(19) United States
(12) Patent Application Publication
(10) Pub. No.: US 2024/0009290 A1
(43) Pub. Date: Jan. 11, 2024

(54) NOVEL VAR2CSA IMMUNOGENS AND METHODS OF USE THEREOF

(71) Applicant: The United States of America,as represented by the Secretary,Department of Health and Human Services, Bethesda, MD (US)

(72) Inventors: Niraj H. Tolia, Bethesda, MD (US); Rui Ma, Bethesda, MD (US); Patrick E. Duffy, Washington, DC (US); Jonathan P. Renn, Falls Church, VA (US)

(73) Assignee: The United States of America,as represented by the Secretary,Department of Health and Human Services, Bethesda, MD (US)

(21) Appl. No.: 18/037,837

(22) PCT Filed: Nov. 18, 2021
(86) PCT No.: PCT/US2021/059941

§ 371 Date: May 19, 2023

Related U.S. Application Data
(60) Provisional application No. 63/115,729, filed on Nov. 19, 2020.

(51) Int. Cl. A61K 39/015; C07K 14/445; A61P 33/06

(52) U.S. Cl. CPC A61K 39/015; C07K 14/445; A61P 33/06; A61K 2039/55566

(57) ABSTRACT

The disclosure provides immunogen polypeptides comprising fragments of VAR2CSA protein expressed by P. falciparum. Aspects of the disclosed immunogen polypeptides comprise all or portions of the CSA binding regions of VAR2CSA as identified by a structural study of VAR2CSA conducted by the inventors. Also provided are compositions comprising such immunogen polypeptides, and methods of using the immunogen polypeptides for vaccination and treatment of disease.

### CROSS-REFERENCE TO RELATED APPLICATION

[0001] This patent application claims the benefit of U.S. Provisional Patent Application No. 63/115,729 filed Nov. 19, 2020, which was filed with color figures, and which is incorporated by reference in its entirety herein.

### STATEMENT REGARDING FEDERALLY SPONSORED RESEARCH OR DEVELOPMENT

[0002] This invention was made with Government support under project numbers ZIAAI001237 and ZIAAI001237 by the National Institutes of Health, National Institute of Allergy and Infectious Diseases. The Government has certain rights in this invention.

### INCORPORATION-BY-REFERENCE OF MATERIAL SUBMITTED ELECTRONICALLY

[0003] Incorporated by reference in its entirety herein is a computer-readable nucleotide/amino acid sequence listing submitted concurrently herewith and identified as follows: One 1,085,939 Byte ASCII (Text) file named “758113_ST25,” created on Nov. 18, 2021.

### BACKGROUND OF THE INVENTION

[0004] The ability to sequester in different organs, combined with sophisticated antigenic diversity, has made P. falciparum the deadliest malaria species that infects humans. Malaria during pregnancy is a major problem in sub-Saharan Africa, affecting an estimated 150 million pregnant women annually. Women can become susceptible to malaria infection during pregnancy despite the immunity that might have developed from prior P. falciparum infections. Pregnant women may also serve as a reservoir for parasites, which poses challenges to malaria eradication.

[0005] Placental malaria is caused by the accumulation of P. falciparum-infected erythrocytes in the placenta of pregnant women, resulting in high rates of maternal anemia, low birth weight, stillbirth and spontaneous pregnancy loss. Each year, up to 200,000 infant deaths and 10,000 maternal deaths are attributed to malaria infection in pregnancy globally. However, women naturally acquire resistance to placental malaria over successive pregnancies, providing a strong basis for the development of vaccines to prevent placental malaria.

[0006] P. falciparum expresses a family of proteins, referred to as erythrocyte membrane protein 1 (PfEMP1) that are translocated to the surface of the infected erythrocyte to enable adherence to different host organs and to evade the host immune response. VAR2CSA is a member of the PfEMP1 family that specifically binds to the syncytiotrophoblast surface receptor chondroitin sulfate A (CSA) leading to placental malaria. Additionally, diverse cancer cells express and present the form of chondroitin sulfate that is typically found in the placenta.

[0007] Due to its large size production of VAR2CSA protein for vaccine development and scientific study has proven challenging. Furthermore, the highly polymorphic nature of the extracellular domain of VAR2CSA in parasite isolates may hinder the development of a strain-transcending vaccine and effective therapeutics.

[0008] Despite the importance of VAR2CSA in both malaria and cancer, critical information has been lacking about the specific recognition mechanism for VAR2CSA binding CSA. Accordingly, improved vaccines and therapeutics based on a more complete picture of VAR2CSA structure and function are needed.

### BRIEF SUMMARY OF THE INVENTION

[0009] Aspects of the present disclosure provide an immunogen polypeptide, wherein the immunogen polypeptide comprises, consists essentially of, or consists of:
[0010] a) all or portions of the major CSA binding channels of VAR2CSA;
[0011] b) all or portions of the minor CSA binding channels of VAR2CSA;
[0012] c) all or portions of the arm segment of VAR2CSA; or
[0013] d) combinations thereof.

[0014] In other aspects, the present disclosure provides a pharmaceutical composition comprising the immunogen polypeptide, and a pharmaceutically acceptable carrier.

[0015] In other aspects, the present disclosure provides a pharmaceutical composition comprising a nucleic acid comprising a region encoding the immunogen polypeptide.

[0016] In other aspects, the present disclosure provides compositions for use in vaccinating a subject against malaria, wherein the composition comprises the disclosed immunogen polypeptides or nucleic acids encoding the disclosed immunogen polypeptides.

[0017] In other aspects, the disclosure provides a method of vaccinating a subject against malaria, the method comprising:
[0018] a) obtaining an immunogen polypeptide, wherein the immunogen polypeptide comprises, consists essentially of, or consists of:
   [0019] 1) all or portions of the major CSA binding channels of VAR2CSA;
   [0020] 2) all or portions of the minor CSA binding channels of VAR2CSA;
   [0021] 3) all or portions of the arm of VAR2CSA; or
   [0022] 4) combinations thereof;
[0023] b) preparing a pharmaceutical composition comprising an effective amount of the immunogen polypeptide and a pharmaceutically acceptable carrier; and
[0024] c) administering the pharmaceutical composition to the subject.

[0025] In other aspects, the present disclosure provides compositions for use in treating or preventing cancer in a subject, wherein the composition comprises the disclosed immunogen polypeptides or nucleic acids encoding the disclosed immunogen polypeptides.

[0026] In other aspects, the disclosure provides a method of treating or preventing cancer in a subject, the method comprising:
[0027] a) obtaining an immunogen polypeptide, wherein the immunogen polypeptide comprises, consists essentially of, or consists of:
   [0028] 1) all or portions of the major CSA binding channels of VAR2CSA;
   [0029] 2) all or portions of the minor CSA binding channels of VAR2CSA;
   [0030] 3) all or portions of the arm of VAR2CSA; or
   [0031] 4) combinations thereof;
[0032] b) preparing a pharmaceutical composition comprising an effective amount of the immunogen polypeptide and a pharmaceutically acceptable carrier; and
[0033] c) administering the pharmaceutical composition to the subject.

[0034] In another aspect, the disclosure provides a nucleic acid, optionally in a vector, encoding an immunogen polypeptide, wherein the immunogen polypeptide comprises, consists essentially of, or consists of:
[0035] a) all or portions of the major CSA binding channels of VAR2CSA;
[0036] b) all or portions of the minor CSA binding channels of VAR2CSA;
[0037] c) all or portions of the arm segment of VAR2CSA; or
[0038] d) combinations thereof.

[0039] In another aspect, the disclosure provides a method for producing an immunogen polypeptide in a cell in a subject, comprising administering to the subject a pharmaceutical composition comprising a modified messenger RNA (mmRNA) such that the mmRNA is introduced into the cell, wherein the mmRNA comprises a translatable region encoding the immunogen polypeptide, and wherein the immunogen polypeptide is produced in the cell. Additional aspects of the disclosure are as described herein.

### BRIEF DESCRIPTION OF THE DRAWINGS

[0040] FIG. 1A depicts a schematic of VAR2CSA NF54 primary structure colored by domain. Domains that were excluded from the ectodomain expression construct or could not be visualized in the final map are colored white. TM: transmembrane domain. ATS: Acidic terminal sequence. The alignments of PRIMVAC, PAMVAC and rVAR2 polypeptide are indicated below.

[0041] FIG. 1B depicts left two views of the Cryo-EM density for the 3.36 Å core structure. Right: the same two views of the atomic model corresponding to the map. Each domain is colored as in a. The CSA major and minor binding channel are highlighted by arrows.

[0042] FIG. 1C depicts two views of the Cryo-EM density for the entire complex with the model docked inside. The full-length density is the combination of the core and arm after local refinement.

[0043] FIG. 1D depicts a schematic drawing of the CSA-VAR2CSA NF54 complex. Each line indicates interactions between the connecting domains. The major binding channel and minor binding channel are highlighted by the hexagon and triangle.

[0044] FIG. 2A depicts the models of the NTS, six DBL domains and 2 ID regions are shown according to the order of the protein sequence. Each domain is colored according to FIG. 1a.

[0045] FIG. 2B depicts NTS unites DBL1X and DBL4ε. NTS is shown in surface while DBL1X and DBL4ε are shown in ribbon. All the domains are colored according to FIG. 1a.

[0046] FIG. 2C depicts a sequence alignment of NTS among different VAR2CSA variants. The range of the final model of the NTS is highlighted by the bar above the sequences. The alignment provides a comparison of the indicated amino acids from wild-type VAR2CSA variants from various strains (SEQ ID NOS: 1, 2 and 55-66).

[0047] FIG. 2D depicts ID3 is an a helix that connects DBL4ε and DBL5ε. ID3 is shown in surface while the rest of the molecule is shown in ribbon.

[0048] FIG. 2E depicts the models of VAR2CSA NF54 are colored in grey shown in two different views. The disulfides bonds are shown as dark circles.

[0049] FIG. 3A depicts two views of the structure showing a dodecamer of CSA is bound in the major binding channel. The Cryo-EM map density of NTS, DBL1X, DBL2X and DBL4≥ are shown in solid with transparency. The Cryo-EM density of CSA is shown in mesh overlaid on the CSA model in stick. The left and right monosaccharide are BDP-12 and BDP-2 indicated by the numbers 12 and 2, respectively. Density for the first monosaccharide of the chain is also observed and labeled with 1. Binding site 1 and 2 are highlighted by the dashed oval and rectangle respectively.

[0050] FIG. 3B depicts an electrostatic surface of VAR2CSA showing the positive charged binding channel of CSA.

[0051] FIG. 3C depicts detailed interactions between CSA and binding site 1. Each monosaccharide is numbered. The protein sequence number and side chains of the residues involved in CSA recognition are shown.

[0052] FIG. 3D depicts detailed interactions between CSA and binding site 1. Each monosaccharide is numbered. The protein sequence number and side chains of the residues involved in CSA recognition are shown.

[0053] FIG. 3E depicts detailed interactions between BDP-2 to ASG-5 and binding site 2. Each monosaccharide is numbered. The protein sequence number and side chains of the residues involved in the CSA recognition are shown.

[0054] FIG. 3F depicts the CSA molecule in the major binding channel is positioned as in FIG. 2A with numbering of each of the monosaccharide. The domains that each monosaccharide interact are indicated below.

[0055] FIG. 3G depicts partial sequence alignment of the residues involved in binding CSA in the major binding channel, the residues in major binding sites 1 and 2 are indicated by light and dark circles respectively. The surface exposed binding site on DBL2 is indicated by the dark line above the table. The alignment provides a comparison of the indicated amino acids from wild-type VAR2CSA variants from various strains (SEQ ID NOS: 1, 2 and 55-66).

[0056] FIG. 4A depicts domain boundaries of VAR2CSA NF54 and VAR2CSA FCR3 ectodomains. The protein sequence identity between the two is labeled.

[0057] FIG. 4B depicts two views of the Cryo-EM density for the 3.38 Å core region of VAR2CSA FCR3.

[0058] FIG. 4C depicts structural alignment of apo VAR2CSA FCR3, cross-linked VAR2CSA FCR3 and the CSA-VAR2CSA NF54 complex.

[0059] FIG. 4D depicts the Electrostatic surface of VAR2CSA FCR3 is shown on the left with a zoom-in view of the CSA binding sites on the right. The major and minor binding channel are indicated by arrows.

[0060] FIG. 5A depicts fourteen sequences of VAR2CSA that represent the diversity were analyzed using ConSurf Surface residues on a space filled model are shaded according to degree of conservation. The color key is shown below. Four different views are illustrated.

[0061] FIG. 5B depicts left: the atomic model of CSA-VAR2CSA NF54 complex. Right: space filling models of the CSA-VAR2CSA binding interface. Surface residues are shaded according to degree of conservation. The color key is shown below. The surface exposed major binding site 1 is highlighted by a black dotted circle.

[0062] FIG. 5C depicts left: the structural model of sequences comprising PRIMVAC and are shown in ribbon. The remainder of the VAR2CSA protein is shown in surface. Right: based on the variability analysis in a, PRIMVAC is shown in bold while the rest of the VAR2CSA molecule is shown in transparent.

[0063] FIG. 5D depicts left: the structural model of sequences comprising PAMVAC and are shown in ribbon. The remainder of the VAR2CSA protein is shown in surface. Right: based on the variability analysis in a, PAMVAC are shown in bold while the rest of the VAR2CSA molecule is shown in transparent.

[0064] FIG. 6 depicts human antibodies epitopes mapped on VAR2CSA. VAR2CSA structure is shown in surface. The characterized neutralizing epitopes are colored as illustrated: P57, P54 and P23-P25 are epitopes on DBL4ε. PAM8.1 epitope is a flexible loop on DBL3X that is missing the final structure and is colored by pink and illustrated by dash line. P62 on DBL3X and P63 on DBL5ε are shown. The cryptic epitopes P20 and P23 on DBL5ε are also shown.

[0065] FIG. 7A depicts domain boundaries of VAR2CSA NF54 and VAR2CSA FCR3 ectodomains that were used in the structural analysis.

[0066] FIG. 7B depicts Top: Size Exclusion Chromatography (SEC) profile of the VAR2CSA NF54 and VAR2CSA FCR3 proteins. Bottom: SDS PAGE analysis of the corresponding SEC fractions of VAR2CSA NF54 (left) and VAR2CSA FCR3 (right).

[0067] FIG. 8A depicts, a flow chart showing the image-processing pipeline for the cryo-EM data of VAR2CSA starting with 6,196 dose-fractionated movies collected on a 300-keV Titan Krios (FEI) equipped with a K2 Summit direct electron detector (Gatan). Data were processed in cryoSPARC. Full frame motion correction was done by cryoSPARC's own implementation. CTF estimation for each micrograph was calculated with Gctf. Particles were autopicked from each micrograph with the blob picker from cryoSPARC and then sorted by 2D classification for two rounds. The twelve highest-populated classes with clear features from the 2D classification are shown. The dataset contained 858,299 particles. A subset of particles was used to generate an ab initio map in cryoSPARC. Particles were classified into 5 classes using the low-pass-filtered (30 Å) ab initio map as a template. Class 1 was selected with 157,702 particles to conduct NU-refinement and generated a 3.87 Å map. A mask covering DBL5ε and DBL6ε domains were then used to perform local refinement and generated a 4.88 Å map. Class 1 and Class 4 which have a clear core density were selected again with 299,571 particles to conduct NU-refinement and generated a 3.5 Å map, local refinement improved the resolution of the core to 3.36 Å.

[0068] FIG. 8B depicts gold-standard FSC curves. The dotted line represents the 0.143 FSC cut-off.

[0069] FIG. 8C depicts angular distribution calculated in cryoSPARC for particle projections of the full-length protein (right) and the core (left). Heat map shows number of particles for each viewing angle.

[0070] FIG. 8D depicts local resolution of the core in two views. The representation of colors for different resolution are shown on the right.

[0071] FIG. 8E depicts local resolution of full length VAR2CSA in two views. The representation of colors for different resolution are shown on the right.

[0072] FIG. 8F depicts local resolution of the arm region in two views. The representation of colors for different resolution are shown on the right.

[0073] FIG. 8G depicts FSC calculated between the refined structures and the full map.

[0074] FIG. 8H depicts representative cryo-EM densities from the core machinery map.

[0075] FIG. 8I depicts representative cryo-EM densities from the arm with DBL5ε and DBL6ε model docked in.

[0076] FIG. 9A depicts a structural alignment of DBL1X with VarO_DBL1α1 (PDB: 2YK0, RMSD:3.18) and IT4var13 DBLβ (PDB:6s8t, RMSD: 2.94).

[0077] FIG. 9B depicts a structural alignment of DBL2X with varO_DBL1α1 (PDB: 2YKO, RMSD:5.75) and PF11_0521 DBLβ (PDB: 5mza, RMSD:4.85).

[0078] FIG. 9C depicts a structural alignment of DBL5ε with IT4var13 DBLβ (PDB: 6s8t, RMSD:8.37) and EBA-175 F2 domain (PDB: 1ZRO, RMSD:4.24).

[0079] FIG. 9D depicts DBL3X-4ε DBL domains are colored according to FIG. 1a.

[0080] FIG. 9E depicts DBL 5ε-6ε, DBL domains are colored according to FIG. 1a.

[0081] FIG. 9F depicts the crystal structure of EBA-175 (PDB: 1ZRO). The F1 and F2 domain are colored in light and dark grey respectively.

[0082] FIG. 9G depicts the crystal structure of EBA-140 (PDB: 4JNO).

[0083] FIG. 9H depicts a structural comparison of VAR2CSA DBL2X-ID and PfEMP1-VarO DBL1α-CIDR. Upper: atomic model of VAR2CSA DBL2X-ID2; Lower: Crystal structure of varO_DBL1α1-CIDRγ.

[0084] FIG. 9I depicts a structural alignment of VAR2CSA_ID2 with varO_CIDRγ subdomain2, RMSD=4.

[0085] FIG. 9J depicts a sequence alignment of the ID2 portion of wild-type VAR2CSA from P. falciparum strain NF54 (SEQ ID NO: 1) and varO_CIDRγ (SEQ ID NO 67).

[0086] FIG. 10A depicts one ASG monosaccharide could be built in a weak density found in the minor binding channel sandwiched by DBL2X and ID2a. The density is shown in mesh. The residues that involve in forming hydrogen bonds with the ASG monosaccharide are illustrated.

[0087] FIG. 10B depicts electrostatic surface of the proteins showing both major binding channel and minor binding channel are positively charged.

[0088] FIG. 10C depicts a partial sequence alignment of the residues involved in the minor binding channel. The residues that interact with the monosaccharide from DBL2X and ID2a are indicated by dark and light circles respectively. The alignment provides a comparison of the indicated amino acids from wild-type VAR2CSA variants from various strains (SEQ ID NOS: 1, 2 and 55-66).

[0089] FIG. 11A depicts flow chart showing the image-processing pipeline for the cryo-EM data of VAR2CSA starting with 100,108 dose-fractionated movies collected on a 300-keV Titan Krios (FEI) equipped with a K2 Summit direct electron detector (Gatan). Processing was done within cryoSPARC. Full frame motion correction was done by cryoSPARC's own implementation. CTF estimation for each micrograph was calculated with Gctf. Particles were autopicked from each micrograph with the blob picker from cryoSPARC and then sorted by 2D classification for two rounds to exclude bad particles. The twelve highest-populated classes with clear features from the 2D classification are shown. The dataset contained 783,088 particles. A subset of particles was used to generate an ab initio map in cryoSPARC. Particles were classified into 10 classes using the low-pass-filtered (30 Å) ab initio map as a template. Class 4 with a total of 271,442 particles was selected to conduct NU-refinement and generated a 4 Å map. A mask covering the arm region were then used to perform local refinement and generated a 4.69 Å map. The angular distribution calculated in cryoSPARC for particle projections are shown in heat map which shows number of particles for each viewing angle.

[0090] FIG. 11B depicts gold-standard FSC curves. The dotted line represents the 0.143 FSC cut-off, which indicates a nominal resolution of 4 Å (dashed) and 4.69 Å (solid) for the full length protein and arm region respectively.

[0091] FIG. 11C depicts local resolution of the full length VAR2CSA map in two views. The representation of colors for different resolution are shown on the right.

[0092] FIG. 11D depicts local resolution of the arm map in two views. The representation of colors for different resolution are shown on the right.

[0093] FIG. 11E depicts flow chart showing the image-processing pipeline for the cryo-EM data of cross-linked VAR2CSA starting with 4,739 dose-fractionated movies collected on a 300-keV Titan Krios (FEI) equipped with a K2 Summit direct electron detector (Gatan). All processing was done within cryoSPARC. Full frame motion correction was done by cryoSPARC's own implementation and a sample. CTF estimation for each micrograph was calculated with Gctf. Particles were auto picked from each micrograph with the blob picker from cryoSPARC and then sorted by 2D classification for two rounds to exclude bad particles. The twelve highest-populated classes with clear features from the 2D classification are shown. The dataset contained 505,409 particles. A subset of particles was used to generate an ab initio map in cryoSPARC. Particles were classified into 3 classes using the low-pass-filtered (30 Å) ab initio map as a template. Class 3 was selected to conduct NU-refinement and generated a 3.52 Å map. A mask covering the core was then used to perform local refinement and generated a 3.38 Å map. The angular distribution calculated in cryoSPARC for particle projections are shown in heat map which shows number of particles for each viewing angle.

[0094] FIG. 11F depicts gold-standard FSC curves. The dotted line represents the 0.143 FSC cut-off, which indicates a nominal resolution of 3.38 Å of the core.

[0095] FIG. 11G depicts local resolution of the cross-linked VAR2CSA FCR3 core map in two views. The representation of colors for different resolution are shown on the right.

[0096] FIG. 12A depicts an atomic model of the core of the cross-linked VAR2CSA FCR3.

[0097] FIG. 12B depicts FSC calculated between the refined structure and the full map.

[0098] FIG. 12C depicts a Representative cryo-EM densities from the core.

[0099] FIG. 12D depicts an Atomic model of full length VAR2CSA FCR3 docked in the 4.06 Å map.

[0100] FIG. 12E depicts FSC calculated between the refined core structure and the full map.

[0101] FIG. 12F depicts a representative cryo-EM densities from the core.

[0102] FIG. 12G depicts a representative cryo-EM densities from the arm with DBL5ε and DBL6ε model docked in.

[0103] FIG. 13A depicts the mechanism of placental sequestration of Plasmodium falciparum. In the placenta, the parasite expresses VAR2CSA on the surface of the infected erythrocytes. VAR2CSA specifically binds to the CSA on the placental synctiotrophoblast through two channels in its core domain with high affinity, leading to the sequestration of the parasite in the placenta and threatening the health of mother and baby.

[0104] FIG. 13B illustrates that cancer cells of various types harbor the same type of CSA on their surfaces. Conjugated VAR2CSA immunogen peptides can therefore be used to deliver drugs or labels specifically to tumor cells.

[0105] FIG. 14 depicts the structural model of rVAR2, which is shown in ribbon. The remainder of the VAR2CSA protein is shown in surface.

[0106] FIG. 15 depicts the results of electrophoresis for the NF54 Core ΔDBL3 (“major and minor channels”, SEQ ID NO: 3), NF54 Core (SEQ ID NO: 5), NF54 DBL56 (“arm”, SEQ ID NO: 7), and FCR3 DBL56 (“arm”, SEQ ID NO: 8).

[0107] FIGS. 16A and 16B depict domain structures of disclosed immunogen polypeptides. Each immunogen polypeptide is illustrated as a schematic representation pair which either highlight the deleted domains (FIG. 17A) or the final construct (FIG. 17B). The “min” refers to constructs that are designed by deleting ID1 and some long flexible loops.

[0108] FIG. 16C depicts schematic diagrams of the structures of disclosed immunogen polypeptides.

[0109] FIG. 17 is a photograph depicting SDS PAGE analysis of the VAR2CSA NF54 immunogens. The purified yield (mg/l) of each immunogen are indicated below the gel.

[0110] FIG. 18 is a graph depicting data demonstrating immunogen polypeptides retain CSA binding affinity. CSA was coated on ELISA plates. After blocking, 10 ug/ml immunogens were added into the wells and detected by HRP conjugated anti-His antibody after washing. MSP1 was used as a negative control.

[0111] FIG. 19 is a graph depicting antibody titers from rats after three immunizations with recombinant immunogen polypeptides adjuvated with CFA/IFA. The rat serum was collected on day 63 after three immunizations (administered on days 0, 21 and 42). Serum pooled from ten rats were used to generate the standard curve. The antibody titers of all disclosed immunogens show statistically significant differences from the control.

[0112] FIG. 20A and 20B are graphs depicting data demonstrating the disclosed immunogen polypeptides induce homologous inhibitory antibodies. Binding inhibition assay using purified IgGs (FIG. 21A: 1 mg/ml; FIG. 21B: 4 mg/ml) from pooled rat serum of each group after three vaccinations adjuvated with CFA/IFA. The 50% inhibition level used as a cutoff for inhibitory or non-inhibitory activity is highlighted as a dash line.

[0113] FIG. 21 is a graph depicting antibody titers from rats after three immunizations with recombinant immunogens adjuvated with AddaS03. The rat serum was collected on day 63 after three immunizations (administered on days 0, 21 and 42). A pool serum of 10 rats were used to generate the standard curve. The antibody titers of all disclosed immunogen polypeptides show statistically significant differences from the control.

[0114] FIG. 22A and 22B are graphs depicting data demonstrating that three specific immunogen polypeptides induce homologous inhibitory antibodies with AddaS03 adjuvant. Binding inhibition assay using IgGs (FIG. 23A: 1 mg/ml; FIG. 23B: 4 mg/ml) purified from the rat's pooled serum from each group after three vaccinations with the CFA/IFA adjuvants. The 50% inhibition level used as a cutoff for inhibitory or non-inhibitory activity is highlighted as a dash line.

[0115] FIG. 23 is a graph depicting a statistical comparison of the two adjuvants CFA/IFA and AddaS03 showing no difference between the groups. The p values are indicated above the table.

[0116] FIG. 24 is a graph depicting a statistical comparison of the antibody titers between the second (day 35) and third (day 63) immunization.

[0117] FIG. 25 is a graph depicting data demonstrating that three specific immunogen polypeptides formulated with AddaS03 induce strong homologous inhibitory antibodies upon either two or three vaccinations. The 50% inhibition level used as a cutoff for inhibitory or non-inhibitory activity is indicated as a dashed line.

[0118] Color versions of many of the figures described above were filed with Provisional Patent Application No. 63/115,729, filed Nov. 19, 2020, which is incorporated by reference in its entirety.

### DETAILED DESCRIPTION OF THE INVENTION

### Immunogen Polypeptides

[0119] As used herein, VAR2CSA refers to VAR2CSA proteins expressed by Plasmodium falciparum and variants of VAR2CSA expressed by Plasmodium falciparum. VAR2CSA is a member of the PfEMP1 family that specifically binds to the syncytiotrophoblast surface receptor chondroitin sulfate A (CSA). One variant of VAR2CSA according to the present disclosure is the wild-type VAR2CSA protein from P. falciparum strain NF54 (SEQ ID NO: 1). Another variant according to the present disclosure is the VAR2SCA protein from P. falciparum strain FCR3 (SEQ ID NO: 2). Another variant according to the present disclosure is the wild-type VAR2SCA protein from P. falciparum strain 7G8 (SEQ ID NO: 55). Another variant according to the present disclosure is the wild-type VAR2SCA protein from P. falciparum strain HB3 (SEQ ID NO: 56). Another variant according to the present disclosure is the wild-type VAR2SCA protein from P. falciparum strain CD01 (SEQ ID NO: 57). Another variant according to the present disclosure is the wild-type VAR2SCA protein from P. falciparum strain Dd2 (SEQ ID NO: 58). Another variant according to the present disclosure is the wild-type VAR2SCA protein from P. falciparum strain GA01 (SEQ ID NO: 59). Another variant according to the present disclosure is the wild-type VAR2SCA protein from P. falciparum strain GB4 (SEQ ID NO: 60). Another variant according to the present disclosure is the wild-type VAR2SCA protein from P. falciparum strain KE01 (SEQ ID NO: 61). Another variant according to the present disclosure is the wild-type VAR2SCA protein from P. falciparum strain KH01 (SEQ ID NO: 62). Another variant according to the present disclosure is the wild-type VAR2SCA protein from P. falciparum strain ML01 (SEQ ID NO: 63). Another variant according to the present disclosure is the wild-type VAR2SCA protein from P. falciparum strain SNO1 (SEQ ID NO: 64). Another variant according to the present disclosure is the wild-type VAR2SCA protein from P. falciparum strain TG01 (SEQ ID NO: 65). Another variant according to the present disclosure is the wild-type VAR2SCA protein from P. falciparum strain GN01 (SEQ ID NO: 66).

[0120] As described in detail in Example 1, the inventors have elucidated the cryo-EM structures of VAR2CSA from P. falciparum strain NF54 in complex with CSA and VAR2CSA from a second P. falciparum strain FCR3.

[0121] The inventors have discovered that VAR2CSA is primarily composed of α-helices and extensive loops that adopt an overall shape resembling the number 7 (FIG. 1c). The region composed of DBL2X to ID3 forms a relatively stable core, while DBL5ε-DBL6ε forms a flexible arm and DBL1X exhibits some structural flexibility. The 6 individual DBL domains of VAR2CSA adopt the classical DBL domain fold, consisting of an α-helical core decorated by extensive loops (FIG. 2a). The individual domains interact in an interwoven manner to stabilize the compact tertiary structure (FIG. 1c, d). DBL4ε, is located at the center of VAR2CSA and unites the whole structure by directly interacting with all the other domains except DBL1X and DBL5ε (FIG. 1c, d). DBL1X and DBL5ε are connected to DBL4ε via the NTS and ID3, respectively (FIG. 1c, d). The NTS (residues 32-49) is a twisted loop surrounding DBL1X and serves as the mortar holding together DBL1X and DBL4ε, with high conservation among diverse VAR2CSA strains (FIG. 2a-c). ID3 is a long helix that closely interacts with ID2 and connects DBL5ε with the core (FIG. 2a, d). A total of 31 pairs of disulfide bridges were identified in the final model (FIG. 2e and Table 3, below).

[0122] When bound by VAR2CSA, the inventors have further discovered that CSA traverses the core domain by binding within two channels, which are referred to herein as the “major CSA binding channels” and the “minor CSA binding channels”.

[0123] Aspects of the disclosure comprises, consists essentially of, or consists of an immunogen polypeptide, wherein the immunogen polypeptide comprises, consists essentially of, or consists of portions of a wildtype VAR2CSA protein, for example a VAR2CSA protein obtained from P. falciparum strain N5F4 or FCR3. The disclosed immunogen polypeptides may encompass important regions of VAR2CSA for binding, conservation and immunogenicity as informed by the structure of VAR2CSA as elucidated by the inventors. For example, the immunogen polypeptide may include regions of wild-type VAR2CSA associated with CSA binding.

[0124] The sequence of the disclosed immunogen polypeptides may be based on the sequence of any suitable VAR2CSA variant. For example, the sequence of the immunogen polypeptide may be derived from the sequences of the VAR2CSA protein from P. falciparum strain 7G8 (SEQ ID NO: 55), the VAR2SCA protein from P. falciparum strain HB3 (SEQ ID NO:56), the VAR2SCA protein from P. falciparum strain CD01 (SEQ ID NO: 57), the VAR2SCA protein from P. falciparum strain Dd2 (SEQ ID NO: 58), the VAR2SCA protein from P. falciparum strain GA01 (SEQ ID NO: 59), the VAR2SCA protein from P. falciparum strain GB4 (SEQ ID NO:60), the VAR2SCA protein from P. falciparum strain KE01 (SEQ ID NO: 61), the VAR2SCA protein from P. falciparum strain KHO1 (SEQ ID NO: 62), the VAR2SCA protein from P. falciparum strain ML01 (SEQ ID NO: 63), the VAR2SCA protein from P. falciparum strain SNO1 (SEQ ID NO: 64), the VAR2SCA protein from P. falciparum strain TGO1 (SEQ ID NO: 65), and/or the VAR2SCA protein from P. falciparum strain GN01 (SEQ ID NO: 66).

[0125] Included in the disclosure are immunogen polypeptides that are functional variants of portions of a wildtype VAR2CSA protein. The term “functional variant,” as used herein, refers to a polypeptide, or protein having substantial or significant sequence identity or similarity to a parent polypeptide, which functional variant retains the biological activity of the immunogen polypeptide of which it is a variant. Functional variants encompass, for example, those variants of the immunogen polypeptides described herein that retain the ability to bind CSA to a similar extent, the same extent, or to a higher extent, as the parent immunogen polypeptide. In reference to the parent polypeptide, the functional variant can, for instance, be at least about 30%, about 50%, about 75%, about 80%, about 90%, about 91%, about 92%, about 93%, about 94%, about 95%, about 96%, about 97%, about 98%, about 99% or more identical in amino acid sequence to the parent polypeptide.

[0126] In general, a functional variant according to the disclosure can, for example, comprise the amino acid sequence of the parent polypeptide with at least one conservative amino acid substitution. Alternatively or additionally, the functional variants can comprise the amino acid sequence of the parent polypeptide with at least one non-conservative amino acid substitution. In this case, it is preferable for the non-conservative amino acid substitution to not interfere with or inhibit the biological activity of the functional variant. The non-conservative amino acid substitution may enhance the biological activity of the functional variant, such that the biological activity of the functional variant is increased as compared to the parent polypeptide.

[0127] The immunogen polypeptide may also comprise functional portions of a wildtype VAR2CSA protein. In general, a “functional portion” according to the disclosure is part or fragment of a parent polypeptide that retains the biological activity of the parent polypeptide. Functional portions encompass, for example, those parts of a wildtype VAR2CSA protein that bind CSA. In reference to the parent polypeptide, the functional portion can comprise, for instance, about 10%, about 25%, about 30%, about 50%, about 70%, about 80%, about 90%, about 91%, about 92%, about 93%, about 94%, about 95%, about 96%, about 97%, about 98%, about 99% or more of the parent polypeptide.

[0128] The functional portion can comprise additional amino acids at the amino or carboxy terminus of the portion, or at both termini, which additional amino acids are not found in the amino acid sequence of the parent polypeptide. Desirably, the additional amino acids do not interfere with the biological function of the functional portion, e.g., binding to CSA. More desirably, the additional amino acids enhance the biological activity, as compared to the biological activity of the parent polypeptide.

[0129] In aspects of the disclosure, the immunogen polypeptide comprises, consists essentially of, or consists of a) all or portions of the major CSA binding channel of VAR2CSA; b) all or portions of the minor CSA binding channel of VAR2CSA; and/or all or portions of the arm segment of VAR2CSA, or functional portions or variants thereof.

[0130] The “major CSA binding channel” refers to a charged channel that is formed by NTS, DBL1X, DBL2X and DBL4ε. (FIG. 3a, b). The major binding channel can be separated into two non-continuous CSA-binding sites (FIG. 3a). The first binding site (“major binding site 1”) is located on the surface of DBL2X and binds CSA residues BDP-8 to ASG-11 (FIG. 3a, c, d). The sulfate group of ASG-11 forms hydrogen bonds with N557 while BDP-10 has interactions with R829, K561 and the main chain of A822 (FIG. 3c). ASG-9 forms multiple hydrogen bonds with K562, N576, K828 and Q832 (FIG. 3d). The interaction of CSA with major binding site 1 is further strengthened by the hydrogen bonds between BDP-8 and K828 (FIG. 3d).

[0131] The second binding site within the major CSA binding channel (“major binding site 2”) lies deep in the hole of the funnel-shaped channel and is surrounded by NTS, DBL1X, DBL2X and DBL4ε (FIG. 3a,b). Multiple hydrogen bonds are also formed in this region: ASG-5 with K835, E1880 and K1889; BDP-4 with K48; ASG-3 with K48 and R846; BDP-2 with R846 and the main chain of 11785 (FIG. 3e). Y45 further stabilizes the interaction by packing tightly with BDP-2 (FIG. 3e). BDP-6 and ASG-7 do not exhibit direct interactions with CSA and without being bound by a particular theory, may serve to link the two major binding sites together (FIG. 3f).

[0132] The “minor CSA binding channel” refers to an area of weak density that the inventors have identified in a separate region of VAR2CSA. The minor CSA binding channel forms a potential second binding site (FIG. 10a). The minor binding channel is made up of the residues from the C-terminus of DBL2X and N-terminus of ID2a, two regions previously implicated in CSA binding. Similar to the major binding channel, the minor channel is rich in positively charged residues (FIG. 10b).

[0133] The “arm segment VAR2CSA” refers to the flexible arm region of VAR2CSA, distinct from the core region, which is formed by DBL5ε-DBL6ε (see, e.g., FIG. 1C, 8F, 8I.)

[0134] In aspects, the immunogen polypeptide comprises NTS, DBL1X, ID1, DBL2X, ID2a, ID2b, DBL3X, DBL4ε, ID3, DBL5ε and DBL6ε. In aspects if the disclosure, this configuration may be referred to as “full length”. In aspects, the immunogen polypeptide comprises NTS, DBL1X, ID1, DBL2X, ID2a, ID2b, DBL3X, DBL4ε, and ID3. In aspects of the disclosure, this configuration may be referred to as the “core”. In aspects, the immunogen polypeptide comprises NTS, DBL1X, DBL2X, ID2a, ID2b, DBL3X, DBL4ε, and ID3. In aspects of the disclosure, this configuration may be referred to as the “core min”. In aspects, the immunogen polypeptide comprises NTS, DBL1X, ID1, DBL2X, ID2a, ID2b, DBL4ε, and ID3. In aspects of the disclosure, this configuration may be referred to as the “major and minor channels”. In aspects, the immunogen polypeptide comprises NTS, DBL1X, DBL2X, ID2a, ID2b DBL4ε, and ID3. In aspects of the disclosure, this configuration may be referred to as the “major and minor channels min”. In aspects, the immunogen polypeptide comprises NTS, DBL1X, ID1, DBL2X, DBL4ε, and ID3. In aspects of the disclosure, this configuration may be referred to as the “major channel”. In aspects, the immunogen polypeptide comprises NTS, DBL1X, DBL2X, DBL4ε, and ID3. In aspects of the disclosure, this configuration may be referred to as the “Major channel min”. In aspects, the immunogen polypeptide comprises DBL5ε and DBL6ε. In aspects of the disclosure this configuration may be referred to as the “Arm”.

[0135] In aspects, the immunogen polypeptide comprises, consists essentially of, or consists of any one of SEQ ID NOS: 3-54. SEQ ID NOS: 3-54 are described in Table 1.

TABLE 1

| SEQ ID NO: | P. falciparum strain | Configuration Description |
|---|---|---|
| 3 | NF54 | Major and minor channels |
| 4 | FCR3 | Major and minor channels |
| 5 | NF54 | Core |
| 6 | FCR3 | Core |
| 7 | NF54 | Arm |
| 8 | FCR3 | Arm |
| 9 | NF54 | Major channel |
| 10 | FCR3 | Major Channel |
| 11 | NF54 | Major channel min |
| 12 | FCR3 | Major channel min |
| 13 | NF54 | DBL2 |
| 14 | FCR3 | DBL2 |
| 15 | NF54 | Core min |
| 16 | FCR3 | Core min |
| 17 | NF54 | Major and minor channels min |
| 18 | FCR3 | Major and minor channels min |
| 19 | 7G8 | Core |
| 20 | HB3 | Core |
| 21 | CD01 | Core |
| 22 | DD2 | Core |
| 23 | GA01 | Core |
| 24 | GB4 | Core |
| 25 | KE01 | Core |
| 26 | KH01 | Core |
| 27 | ML01 | Core |
| 28 | SN01 | Core |
| 29 | TG01 | Core |
| 30 | GN01 | Core |
| 31 | 7G8 | Major and minor channels |
| 32 | HB3 | Major and minor channels |
| 33 | CD01 | Major and minor channels |
| 34 | DD2 | Major and minor channels |
| 35 | GA01 | Major and minor channels |
| 36 | GB4 | Major and minor channels |
| 37 | KE01 | Major and minor channels |
| 38 | KH01 | Major and minor channels |
| 39 | ML01 | Major and minor channels |
| 40 | SN01 | Major and minor channels |
| 41 | TG01 | Major and minor channels |
| 42 | GN01 | Major and minor channels |
| 43 | 7G8 | Major channel |
| 44 | HB3 | Major channel |
| 45 | CD01 | Major channel |
| 46 | DD2 | Major channel |
| 47 | GA01 | Major channel |
| 48 | GB4 | Major channel |
| 49 | KE01 | Major channel |
| 50 | KH01 | Major channel |
| 51 | ML01 | Major channel |
| 52 | SN01 | Major channel |
| 53 | TG01 | Major channel |
| 54 | GN01 | Major channel |

[0136] In aspects, the immunogen polypeptide comprises, consists essentially of, or consists of a polypeptide having at least about 80% identity with any one of SEQ ID NOs: 3-54. In aspects, the immunogen polypeptide comprises, consists essentially of, or consists of a polypeptide having at least about 85% identity with any one of SEQ ID NOs: 3-54. In aspects, the immunogen polypeptide comprises, consists essentially of, or consists of a polypeptide having at least about 90% identity with any one of SEQ ID NOs: 3-54. In aspects, the immunogen polypeptide comprises, consists essentially of, or consists of a polypeptide having at least about 90%, about 91%, about 92%, about 93%, about 94%, about 95%, about 96%, about 97%, about 98%, about 99%, or more identity with any one of SEQ ID NOs: 3-54.

[0137] “Conserved CSA binding channel residues” refers to residues within the major and minor CSA binding channels that are highly conserved among different VAR2CSA alleles and among different strains of P. falciparum. Conserved CSA binding channel residues, discovered by the inventors, are presented in FIG. 3g and FIG. 10c. Without being bound by a particular theory, the high conservation of the residues within both channels that directly bind CSA indicate these residues are under selective pressure to be maintained across strains.

[0138] In aspects, “conserved CSA binding channel residues” refers to one or more amino acids corresponding to the following amino acids in the major CSA binding channel of full length VAR2CSA from P. falciparum strain NF54 (SEQ ID NO:1): 44-46, 47-49, 556-558, 560-563, 575-577, 821-823, 827-836, 1784-1786, 1879-1881, and 1888-1890. In aspects, the “conserved CSA binding channel residues” refers to one or more amino acids corresponding to the following amino acids in the major CSA binding channel of full length VAR2CSA from P. falciparum strain NF54 (SEQ ID NO:1): 45, 48, 557, 561, 562, 576, 822, 828, 829, 832, 835, 1785, 1880, and 1889. In aspects, “conserved CSA binding channel residues” refers to one or more amino acids corresponding to the following amino acids in the minor CSA binding channel of full length VAR2CSA from P. falciparum strain NF54 (SEQ ID NO:1): 911-913, 951-953, and 967-971. In aspects, the “conserved CSA binding channel residues” refers to one or more amino acids corresponding to the following amino acids in the minor CSA binding channel of full length VAR2CSA from P. falciparum strain NF54 (SEQ ID NO:1): 912, 952, 968, and 970.

[0139] One skilled in the art will recognize that the above listed amino acid numbers refer to the VAR2CSA protein expressed by the NF54 strain of P. falciparum. One skilled in the art will further understand that different strains of P. falciparum may express different VAR2CSA alleles or variants. One skilled in the art will be able to identify the amino acids in such different VAR2CSA alleles or variants that correspond with the above listed amino acids in the NF54 VAR2CSA protein by, for example, analyzing sequence and crystallographic data. For example, corresponding amino acids may be identified by performing sequence alignments comparing the sequence of the NF54 VAR2CSA to other VAR2CSA alleles or variants. Examples of such alignments are depicted in FIGS. 3G and 10C.

[0140] Amino acid substitutions of the disclosed immunogen polypeptides are preferably conservative amino acid substitutions. Conservative amino acid substitutions are known in the art, and include amino acid substitutions in which one amino acid having certain physical and/or chemical properties is exchanged for another amino acid that has the same or similar chemical or physical properties. For instance, the conservative amino acid substitution can be an acidic/negatively charged polar amino acid substituted for another acidic/negatively charged polar amino acid (e.g., Asp or Glu), an amino acid with a nonpolar side chain substituted for another amino acid with a nonpolar side chain (e.g., Ala, Gly, Val, Ile, Leu, Met, Phe, Pro, Trp, Cys, Val, etc.), a basic/positively charged polar amino acid substituted for another basic/positively charged polar amino acid (e.g. Lys, His, Arg, etc.), an uncharged amino acid with a polar side chain substituted for another uncharged amino acid with a polar side chain (e.g., Asn, Gln, Ser, Thr, Tyr, etc.), an amino acid with a beta-branched side-chain substituted for another amino acid with a beta-branched side-chain (e.g., Ile, Thr, and Val), an amino acid with an aromatic side-chain substituted for another amino acid with an aromatic side chain (e.g., His, Phe, Trp, and Tyr), etc.

[0141] The immunogen polypeptide can consist essentially of the specified amino acid sequence or sequences described herein, such that other components, e.g., other amino acids, do not materially change the biological activity of the functional variant.

[0142] In aspects, the immunogen polypeptide of the disclosure (including functional portions and functional variants) can be of any length, i.e., can comprise any number of amino acids, provided that the immunogen polypeptides (or functional portions or functional variants thereof) retain their biological activity, e.g., the ability to specifically bind to antigen, detect diseased cells in a mammal, or treat or prevent disease in a mammal, etc. For example, the immunogen polypeptide can be about 50 to about 5000 amino acids long, such as 50, 70, 75, 100, 125, 150, 175, 200, 300, 400, 500, 600, 700, 800, 900, 1000 or more amino acids in length.

[0143] The immunogen polypeptide of aspects of the disclosure (including functional portions and functional variants of the disclosure) can comprise synthetic amino acids in place of one or more naturally-occurring amino acids. Such synthetic amino acids are known in the art, and include, for example, aminocyclohexane carboxylic acid, norleucine, α-amino n-decanoic acid, homoserine, S-acetylaminomethyl-cysteine, trans-3- and trans-4-hydroxyproline, 4-aminophenylalanine, 4-nitrophenylalanine, 4-chlorophenylalanine, 4-carboxyphenylalanine, β-phenylserine β-hydroxyphenylalanine, phenylglycine, α-naphthylalanine, cyclohexylalanine, cyclohexylglycine, indoline-2-carboxylic acid, 1,2,3,4-tetrahydroisoquinoline-3-carboxylic acid, aminomalonic acid, aminomalonic acid monoamide, N′-benzyl-N′-methyl-lysine, N′,N′-dibenzyl-lysine, 6-hydroxylysine, ornithine, α-aminocyclopentane carboxylic acid, α-aminocyclohexane carboxylic acid, α-aminocycloheptane carboxylic acid, α-(2-amino-2-norbornane)-carboxylic acid, α,γ-diaminobutyric acid, α,β-diaminopropionic acid, homophenylalanine, and α-tert-butylglycine.

[0144] In aspects, the immunogen polypeptides of the disclosure can be glycosylated, amidated, carboxylated, phosphorylated, esterified, N-acylated, cyclized via, e.g., a disulfide bridge, or converted into an acid addition salt and/or optionally dimerized or polymerized, or conjugated.

[0145] The immunogen polypeptides of the disclosure may be conformationally stabilized in any of a number of ways, including for, example, the use of disulfide bonds or lactam bridges.

[0146] The immunogen polypeptides of the present disclosure can be composed of amino acids joined to each other by peptide bonds or modified peptide bonds, i.e., peptide isosteres, and may contain amino acids other than the 20 gene-encoded amino acids. The polypeptides may be modified by either natural processes, such as posttranslational processing, or by chemical modification techniques. Both post-translational modifications and chemical modification techniques are well described in the art. Modifications can occur anywhere in a polypeptide, including the peptide backbone, the amino acid side-chains and the amino or carboxyl termini. The same type of modification may be present in the same or varying degrees at several sites in a given polypeptide, and a given polypeptide may contain many types of modifications. Polypeptides may be branched, for example, as a result of ubiquitination, and they may be cyclic, with or without branching. Cyclic, branched, and branched cyclic polypeptides may result from posttranslational natural processes or may be made by synthetic methods.

[0147] In aspects of the disclosure, the immunogen polypeptides may be modified. Modifications include acetylation, acylation, ADP-ribosylation, amidation, covalent attachment of flavin, covalent attachment of a heme moiety, covalent attachment of a nucleotide or nucleotide derivative, covalent attachment of a lipid or lipid derivative, covalent attachment of phosphatidylinositol, cross-linking, cyclization, disulfide bond formation, demethylation, formation of covalent cross-links, formation of cysteine, formation of pyroglutamate, formylation, gamma-carboxylation, glycosylation, GPI anchor formation, hydroxylation, iodination, methylation, myristoylation, oxidation, pegylation, proteolytic processing, phosphorylation, prenylation, racemization, selenoylation, sulfation, transfer-RNA mediated addition of amino acids to proteins such as arginylation, and ubiquitination. (See, for instance, Proteins-Structure and Molecular Properties, 2nd Ed., T. E. Creighton, W. H. Freeman and Company, New York (1993); Posttranslational Covalent Modification of Proteins, B. C. Johnson, Ed., Academic Press, New York, pgs. 1-12 (1983); Seifter et al., 1990, Meth. Enzymol. 182:626-646; Rattan et al., 1992, Ann. 1VY Acad. Sci. 663:48-62).

[0148] In aspects, the immunogen polypeptides of the disclosure (including functional portions and functional variants thereof) can be obtained by methods known in the art. The immunogen polypeptides may be made by any suitable method of making polypeptides or proteins, including de novo synthesis. Also, the immunogen polypeptides can be recombinantly produced using the nucleic acids described herein using standard recombinant methods. See, for instance, Green et al., Molecular Cloning: A Laboratory Manual, 4th ed., Cold Spring Harbor Press, Cold Spring Harbor, NY 2012. Further, portions of some of the immunogen polypeptides of the disclosure (including functional portions and functional variants thereof) can be isolated and/or purified from a source, such as a plant, a bacterium, an insect, a mammal, e.g., a rat, a human, etc. Methods of isolation and purification are well-known in the art. Alternatively, the immunogen polypeptides described herein (including functional portions and functional variants thereof) can be commercially synthesized by companies, such as Synpep (Dublin, CA), Peptide Technologies Corp. (Gaithersburg, MD), and Multiple Peptide Systems (San Diego, CA). In this respect, the disclosed immunogen polypeptides can be synthetic, recombinant, isolated, and/or purified. In aspects, the immunogen polypeptides are prepared by recombinant production using overexpression of desired nucleic acid sequences (i.e., sequences encoding the immunogen polypeptides) from plasmids in mammalian cell culture expression systems such as, e.g., Expi293.

[0149] In aspects of the disclosure, the immunogen polypeptide is isolated or purified. “Isolated” refers to the removal of a substance (e.g., a protein or nucleic acid) from its natural environment. “Purified” means that a given substance (e.g., a protein or nucleic acid), whether one that has been removed from nature (e.g., genomic DNA and mRNA) or synthesized (e.g., cDNA) and/or amplified under laboratory conditions, has been increased in purity, wherein “purity” is a relative term, not “absolute purity.” It is to be understood, however, that nucleic acids and proteins may be formulated with diluents or adjuvants and still for practical purposes be isolated. For example, proteins typically are mixed with an acceptable carrier or diluent when used for introduction into cells.

[0150] In other aspects of the disclosure, the immunogen polypeptides may not be isolated. In aspects of the disclosure, the immunogen polypeptides may not be purified.

[0151] When the immunogen polypeptides, are in the form of a salt, preferably, the polypeptides are in the form of a pharmaceutically acceptable salt. Suitable pharmaceutically acceptable acid addition salts include those derived from mineral acids, such as hydrochloric, hydrobromic, phosphoric, metaphosphoric, nitric, and sulphuric acids, and organic acids, such as tartaric, acetic, citric, malic, lactic, fumaric, benzoic, glycolic, gluconic, succinic, and arylsulphonic acids, for example, p-toluenesulphonic acid.

[0152] In aspects of the disclosure, the immunogen polypeptide can consist essentially of the immunogen polypeptides as described herein, such that other components, e.g., other amino acids, do not materially change the biological activity of the immunogen polypeptide. In other aspects of the disclosure, the immunogen polypeptide can consist of the immunogen polypeptides as described herein. Pharmaceutical Compositions

[0153] The disclosed immunogen polypeptides can be formulated into a composition, such as a pharmaceutical composition. In this regard, aspects of the disclosure provide a pharmaceutical composition comprising any of the disclosed immunogen polypeptides described herein and a pharmaceutically acceptable carrier. The pharmaceutical composition can comprise an disclosed immunogen polypeptide in combination with other pharmaceutically active agents or drugs, such as chemotherapeutic agents. A pharmaceutical composition according to the present disclosure may comprise immunogen polypeptides comprising immunogen polypeptides based on one or more wild type VAR2CSA variants.

[0154] With respect to pharmaceutical compositions, the pharmaceutically acceptable carrier can be any of those conventionally used and is limited only by chemico-physical considerations, such as solubility and lack of reactivity with the active agent(s), and by the route of administration. The pharmaceutically acceptable carriers described herein, for example, vehicles, adjuvants, excipients, and diluents, are well-known to those skilled in the art and are readily available to the public. It is preferred that the pharmaceutically acceptable carrier be one which has no detrimental side effects or toxicity under the conditions of use. The pharmaceutical carrier can be water.

[0155] The choice of carrier will be determined in part by the particular disclosed immunogen polypeptides, as well as by the particular method used to administer the disclosed immunogen polypeptides. Accordingly, there are a variety of suitable formulations of the pharmaceutical composition of the disclosure. Methods for preparing administrable (e.g., parenterally administrable) compositions are known or apparent to those skilled in the art and are described in more detail in, for example, Remington: The Science and Practice of Pharmacy, Pharmaceutical Press; 22nd ed. (2012).

[0156] The disclosed immunogen polypeptides may be administered in any suitable manner. Preferably, the immunogen polypeptides are administered by injection, (e.g., subcutaneously, intravenously, intratumorally, intraarterially, intramuscularly, intradermally, interperitoneally, or intrathecally). In aspects, the disclosed immunogen polypeptides are administered intravenously. In other aspects, the disclosed immunogen polypeptides are administered subcutaneously. A suitable pharmaceutically acceptable carrier for the disclosed immunogen polypeptides for injection may include any isotonic carrier such as, for example, normal saline (about 0.90% w/v of NaCl in water, about 300 mOsm/L NaCl in water, or about 9.0 g NaCl per liter of water), NORMOSOL R electrolyte solution (Abbott, Chicago, IL), PLASMA-LYTE A (Baxter, Deerfield, IL), about 5% dextrose in water, or Ringer's lactate. In aspects, the pharmaceutically acceptable carrier is supplemented with human serum albumen.

[0157] The compositions may contain any suitable amount of the disclosed immunogen polypeptides. For example, the compositions may contain from about 0.5% to about 25% by weight of the immunogen polypeptide in solution. Preservatives and buffers may be used. In order to minimize or eliminate irritation at the site of injection, such compositions may contain one or more nonionic surfactants having a hydrophile-lipophile balance (HLB) of from about 12 to about 17. The quantity of surfactant in such formulations will typically range from about 5% to about 15% by weight. Suitable surfactants include polyethylene glycol sorbitan fatty acid esters, such as sorbitan monooleate and the high molecular weight adducts of ethylene oxide with a hydrophobic base, formed by the condensation of propylene oxide with propylene glycol. The parenteral formulations can be presented in unit-dose or multi-dose sealed containers, such as ampoules and vials, and can be stored in a freeze-dried (lyophilized) condition requiring only the addition of the sterile liquid excipient, for example, water, for injections, immediately prior to use. Extemporaneous injection solutions and suspensions can be prepared from sterile powders, granules, and tablets.

[0158] Alternatively, the composition can be modified into a depot form, such that the manner in which the vaccine protein is released into the body to which it is administered is controlled with respect to time and location within the body (see, for example, U.S. Pat. No. 4,450,150). Depot forms of immunogen polypeptides can be, for example, an implantable composition comprising the vaccine proteins and a porous or non-porous material, such as a polymer, wherein the immunogen polypeptide is encapsulated by or diffused throughout the material and/or degradation of the non-porous material. The depot is then implanted into the desired location within the body and the immunogen polypeptides are released from the implant at a predetermined rate.

[0159] Aspects of the disclosure include compositions comprising multimers of the disclosed immunogen polypeptides. As used herein, “multimer” refers to polymer comprising 2 or more immunogen polypeptides. The term multimer includes immunogen peptide dimers, immunogen peptide trimers, immunogen peptide tetramers and higher immunogen peptide multimers. Multimers of the immunogen polypeptides may have improved binding characteristics, e.g. to CSA, and may have improved immunogenicity relative to immunogen polypeptide monomers.

[0160] Aspects of the disclosure include compositions comprising the disclosed immunogen polypeptides in nanoparticle form. As used herein, “nanoparticle” refers to a particle having a nanoscale size in at least one dimension (e.g., one, two, or three dimensions), e.g., about 1 nm, about 10 nm, or about 100 nm. Immunogen polypeptides formulated as nanoparticles may have improved binding characteristics, e.g. to CSA, and may have improved immunogenicity relative to immunogen polypeptides not formulated as nano particles.

[0161] In aspects, the composition may further comprise an additional therapeutic agent. The additional therapeutic agents can be, for example, plant, fungal, or bacterial molecules (e.g., a protein toxin), small molecule chemotherapeutics, or biological therapeutics. In aspects, the additional therapeutic agents comprise chemotherapeutic agents or anticancer agents. Suitable chemotherapeutic agents or other anticancer agents for use in accordance with the disclosure include but are not limited to tyrosine kinase inhibitors (genistein), biologically active agents (TNF, of tTF), radionuclides (1311, 90Y, 111In, 211At, 32P and other known therapeutic radionuclides), adriamycin, ansamycin antibiotics, asparaginase, bleomycin, busulphan, cisplatin, carboplatin, carmustine, capecitabine, chlorambucil, cytarabine, cyclophosphamide, camptothecin, dacarbazine, dactinomycin, daunorubicin, dexrazoxane, docetaxel, doxorubicin, etoposide, epothilones, floxuridine, fludarabine, fluorouracil, gemcitabine, hydroxyurea, idarubicin, ifosfamide, irinotecan, lomustine, mechlorethamine, mercaptopurine, meplhalan, methotrexate, rapamycin (sirolimus) and derivatives, mitomycin, mitotane, mitoxantrone, nitrosurea, paclitaxel, pamidronate, pentostatin, plicamycin, procarbazine, rituximab, streptozocin, teniposide, thioguanine, thiotepa, taxanes, vinblastine, vincristine, vinorelbine, taxol, combretastatins, discodermolides, and transplatinum. Accordingly, suitable chemotherapeutic agents for use in accordance with disclosure include, without limitation, antimetabolites (e.g., asparaginase), antimitotics (e.g., vinca alkaloids), DNA damaging agents (e.g., cisplatin), proapoptotics (agents which induce programmed-cell-death or apoptosis) (e.g, epipodophyllotoxins), differentiation inducing agents (e.g., retinoids), antibiotics (e.g., bleomycin), and hormones (e.g., tamoxifen, diethylstilbestrol).

[0162] Further, suitable chemotherapeutic agents for use in accordance with the disclosure include antiangiogenesis agents (angiogenesis inhibitors) such as, e.g., INF-alpha, fumagillin, angiostatin, endostatin, thalidomide, and the like. “Other anticancer agents” also include, without limitation, biologically active polypeptides, antibodies, lectins, and toxins. Suitable antibodies for use in accordance with the disclosure include, without limitation, conjugated (coupled) or unconjugated (uncoupled) antibodies, monoclonal or polyclonal antibodies, humanized or unhumanized antibodies, as well as Fab′, Fab, or Fab2 fragments, single chain antibodies and the like.

[0163] In aspects, the disclosure comprises, consists essentially of, or consists of a pharmaceutical composition comprising an additional therapeutic agent coupled, conjugated or fused to an immunogen polypeptide. The chemotherapeutic agent can be coupled to the immunogen polypeptide using any suitable method. Preferably, the additional therapeutic agent is chemically coupled to the compound via covalent bonds including, for example, disulfide bonds. Other methods for coupling or conjugation of suitable therapeutics, chemotherapeutics, ra.dionuclides, polypeptides, and the disclosed immunogen polypeptides are well described in the art. Any suitable method can he used in accordance with the disclosure to form the immunogen polypeptide conjugates. For example, without limitation, free amino groups in the immunogen polypeptide, such the epsilon-amino group of lysine, can be conjugated with reagents such as carbodiimides or heterobifunctional agents. In aspects, e.g., sulfhydryl groups can be used for conjugation. In addition, sugar moieties bound to immunogen polypeptides, can be oxidized to foam aldehydes groups useful in a number of coupling procedures known in the art. The conjugates formed in accordance with the disclosure can be stable in vivo or labile, such as enzymatically degradable tetrapeptide linkages or acid-labile cis-aconityl or hydrazone linkages.

[0164] In aspects of the disclosure, the pharmaceutical composition can consist essentially of the pharmaceutical compositions as described herein, such that other components, e.g., other excipients, do not materially change the characteristics of the pharmaceutical composition. In other aspects of the disclosure, the pharmaceutical composition can consist of the pharmaceutical compositions as described herein.

### Methods of Vaccination

[0165] In aspects, the disclosure comprises, consists essentially of, or consists of a method of vaccinating a subject against malaria. The method comprises, consists essentially of, or consists of obtaining an isolated or purified immunogen polypeptide.

[0166] Immunogen polypeptides suitable for the methods of vaccinating are described above. Such immunogen polypeptides comprise, consist essentially of, or consist of a) all or portions of the major CSA binding channel of VAR2CSA; and/or b) all or portions of the minor CSA binding channel of VAR2CSA. In aspects the immunogen polypeptide comprises, consists essentially of, or consists of all or portions of the major CSA binding channel. In aspects the immunogen polypeptide comprises, consists essentially of, or consists of all or portions of the minor CSA binding channel. In aspects the immunogen polypeptide comprises, consists essentially of, or consists of all or portions of the arm segment. The immunogen polypeptide may comprise one or more conserved VAR2CSA binding channel residues as described above. In certain aspects, the conserved VAR2CSA binding residues are located in the major CSA binding channel of VAR2CSA.

[0167] In aspects, the method of vaccinating a subject against malaria comprises, consists essentially of, or consists of obtaining an immunogen polypeptide having at least 80% identity with any one of SEQ ID NOs: 3-54. In aspects, the immunogen polypeptide comprises, consists essentially of, or consists of a polypeptide having at least 85% identity with any one of SEQ ID NOs: 3-54. In aspects, the immunogen polypeptide comprises, consists essentially of, or consists of a polypeptide having at least 90% identity with any one of SEQ ID NOs: 3-54. In aspects, the immunogen polypeptide comprises, consists essentially of, or consists of a polypeptide having at least 95% identity with any one of SEQ ID NOs: 3-54. In some aspects the immunogen polypeptide comprises, consists essentially of, or consists of any one of SEQ ID Nos: 3-54.

[0168] In aspects, the method of vaccinating a subject against malaria comprises, consists essentially of, or consists of administering an effective amount of a pharmaceutical composition. Examples of suitable pharmaceutical formulations are provided above. For the purposes of vaccination, compositions can be administered in dosages and by techniques well known to those skilled in the medical or veterinary arts, taking into consideration such factors as the age, sex, weight, species and condition of the recipient subject, and the route of administration.

[0169] In aspects, the method of vaccinating a subject against malaria comprises, consists essentially of, or consists of administering an effective amount of the composition to the subject. In the context of methods of vaccinating a subject against malaria, “effective amount” refers to the amount of a composition necessary to provide at least a partial protective effect against natural malaria infection, as evidenced by a reduction in the mortality and morbidity associated with natural malaria infection.

[0170] The effective dosage of the composition made according to the present disclosure will depend on the species, age, size, vaccination history, and health status of the subject to be vaccinated. Other factors like immunogen polypeptide concentration, and route of administration (i.e., subcutaneous, intradermal, oral, intramuscular or intravenous administration) will also impact the effective dosage. One skilled in the art will be able to readily determine the effective dosage based on the antigen concentration of the vaccine, the route of administration, and the age and condition of the subject. In aspects, each batch of antigen may be individually calibrated. Alternatively, methodical immunogenicity trials of different dosages, as well as LD5o studies and other screening procedures can be used to determine the effective dosage. Such methods are well known to those skilled in the art and require no undue experimentation. The effective dose of the immunogen polypeptide also will be determined by the existence, nature and extent of any adverse side effects that might accompany the administration of a particular immunogen polypeptide. By way of example, and without limitation, the dose of the immunogen polypeptide can be about 0.001 to about 1000 mg/kg body weight of the subject being treated/day, from about 0.01 to about 10 mg/kg body weight/day, about 0.01 mg to about 1 mg/kg body weight/day.

[0171] The route of administration of the pharmaceutical composition in accordance with the methods of vaccination may be percutaneous, via mucosal administration (e.g., oral, nasal, anal, vaginal) or via a parenteral route (intradermal, intramuscular, subcutaneous, intravenous, or intraperitoneal). Vaccine compositions can be administered alone, or can be co-administered or sequentially administered with other treatments or therapies.

[0172] In aspects, forms of administration may include suspensions, syrups or elixirs, and preparations for parenteral, subcutaneous, intradermal, intramuscular or intravenous administration (e.g., injectable administration) such as sterile suspensions or emulsions. Vaccine compositions may be administered as a spray or mixed in food and/or water or delivered in admixture with a suitable carrier, diluent, or excipient such as sterile water, physiological saline, glucose, or the like. The compositions can contain auxiliary substances such as wetting or emulsifying agents, pH buffering agents, adjuvants, gelling or viscosity enhancing additives, preservatives, flavoring agents, colors, and the like, depending upon the route of administration and the preparation desired.

[0173] In aspects, the administration of the composition elicits an immune response in the subject. As used herein, the term “immune response” refers to a response elicited in a subject. An immune response may refer to cellular immunity; humoral immunity or both. The present disclosure also contemplates a response limited to a part of the immune system. In aspects, the immune response elicited by the administration of the disclosed pharmaceutical compositions is sufficient to provide at least a partial protective effect against natural malaria infection, as evidenced by a reduction in the mortality and morbidity associated with natural malaria infection. In aspects, the immune response is sufficient to provide at least a partial protective effect against natural placental malaria infection, as evidenced by a reduction in the mortality and/or morbidity associated with natural placental malaria infection. In aspects, the reduction in mortality and morbidity is strain transcending. In other words, aspects of the disclosed methods of vaccination provide a protective effect against natural infection by more than one strain of P. falciparum.

[0174] In aspects of the disclosure, the methods of vaccination can consist essentially of the methods of vaccination as described herein, such that any variation does not materially change the characteristics of the method. In other aspects of the disclosure, the methods of vaccination consist of the methods of vaccination as described herein.

### Methods of Treatment

[0175] In aspects, the disclosure provides a method for treating a disease in a subject. The subject may be any organism. In certain aspects the subject is a mammal. In preferred aspects the subject is human.

[0176] In aspects, the disease may include abnormal conditions of proliferation, tissue remodeling, hyperplasia, and exaggerated wound healing in bodily tissue (e.g., soft tissue, connective tissue, bone, solid organs, blood vessel and the like). In aspects, the disclosure comprises, consists essentially of, or consists of a method of treating or preventing cancer.

[0177] Non-limiting examples of specific types of cancers include cancer of the head and neck, eye, skin, mouth, throat, esophagus, chest, bone, lung, colon, sigmoid, rectum, stomach, prostate, breast, ovaries, uterus (e.g., endometrium), kidney, liver, pancreas, brain, intestine, heart or adrenals. More particularly, cancers include solid tumor, sarcoma, carcinomas, fibrosarcoma, myxosarcoma, liposarcoma, chondrosarcoma, osteogenic sarcoma, chordoma, angiosarcoma, endotheliosarcoma, lymphangiosarcoma, lymphangioendothelio sarcoma, synovioma, mesothelioma, Ewing's tumor, leiomyosarcoma, rhabdomyosarcoma, colon carcinoma, pancreatic cancer, breast cancer, ovarian cancer, prostate cancer, squamous cell carcinoma, basal cell carcinoma, adenocarcinoma, sweat gland carcinoma, sebaceous gland carcinoma, papillary carcinoma, papillary adenocarcinomas, cystadenocarcinoma, medullary carcinoma, bronchogenic carcinoma, renal cell carcinoma, hepatoma, bile duct carcinoma, choriocarcinoma, seminoma, embryonal carcinoma, Wilms' tumor, cervical cancer, testicular tumor, lung carcinoma, small cell lung carcinoma, bladder carcinoma, epithelial carcinoma, glioma, astrocytoma, medulloblastoma, craniopharyngioma, ependymoma, Kaposi's sarcoma, pinealoma, hemangioblastoma, acoustic neuroma, oligodendroglioma, meningioma, melanoma, neuroblastoma, retinoblastoma, a blood-born tumor, acute lymphoblastic leukemia, acute lymphoblastic B-cell leukemia, acute lymphoblastic T-cell leukemia, acute myeloblastic leukemia, acute promyelocytic leukemia, acute monoblastic leukemia, acute erythroleukemic leukemia, acute megakaryoblastic leukemia, acute myelomonocytic leukemia, acute nonlymphocyctic leukemia, acute undifferentiated leukemia, chronic myelocytic leukemia, chronic lymphocytic leukemia, hairy cell leukemia, or multiple myeloma. See, e.g., Harrison's Principles of Internal Medicine, Eugene Braunwald et al., eds., pp.491 762 (15th ed. 2001).

[0178] In aspects the cancer is a CSA expressing cancer. A non-limiting list of cancers known to express CSA is provided as Table 2.

TABLE 2

| Disease/cancer line studied | Potential usage | Reference |
|---|---|---|
| Colorectal cancer | Treatment, Diagnosis | Mette Ø. Agerbaek, et al., Nature Communications, 2018; Nicolai T. |
| (CDLO205, HT-29, SW480) | | Sand, et al., Int. J. Mol. Sci. 2020. |
| Lung cancer | Treatment, Diagnosis | Nicolai T. Sand, et al., Int. J. Mol. Sci. 2020. |
| (A549) | | |
| Breast cancer | Treatment, Diagnosis | Mette Ø. Agerbaek, et al., Nature Communications, 2018; Nicolai T. |
| (MDA-MB-231, MCF7, Hs578T, SK-BR-3) | | Sand, et al., Int. J. Mol. Sci. 2020. |
| Prostate cancer | Treatment, Diagnosis | Mette Ø. Agerbaek, et al., Nature Communications, 2018; Nicolai T. |
| (LNCaP, PC3, DU145) | | Sand, et al., Int. J. Mol. Sci. 2020. |
| Osteosarcoma | Treatment, Diagnosis | Mette Ø. Agerbaek, et al., Nature Communications, 2018 |
| (U2OS) | | |
| Melanoma | Treatment, Diagnosis | Mette Ø. Agerbaek, et al., Nature Communications, 2018 |
| (C32) | | |
| Diffuse gliomas/brain cancer | Diagnosis | Sara R. Beng-Christensen, et al., Cells, 2019 |
| (KNS-42, Res259, U87 mg, and U118 mg) | | |

[0179] The terms “treating,” and “preventing,” as used herein, refer to curative therapy, prophylactic therapy, or preventative therapy. An example of “preventing” or “preventative therapy” is the prevention or lessening of the chance of a targeted disease (e. g., cancer or other proliferative disease), or related condition thereto, occurring in a subject. Those in need of such preventative therapy may include those already with the disease or condition as well as those prone to have the disease or condition to be prevented. The terms “treating,” “treatment,” “therapy,” and “therapeutic treatment” as used herein also describe the management and care of a subject (e.g. a human) for the purpose of combating a disease, or related condition, and includes the administration of a composition to alleviate the symptoms, side effects, or other complications of the disease, condition. Therapeutic treatment for cancer includes, but is not limited to, surgery, chemotherapy, radiation therapy, gene therapy, and immunotherapy.

[0180] The methods of treating or preventing cancer comprise obtaining an isolated or purified immunogen polypeptide. Immunogen polypeptides suitable for the methods of treating or preventing cancer are described above. Such immunogen polypeptides may comprise, consist essentially of, or consist of a) all or portions of the major CSA binding channel of VAR2CSA; b) all or portions of the minor CSA binding channel of VAR2CSA; and/or c) all or portions of the arm segment of VAR2CSA. In aspects the immunogen polypeptide comprises, consists essentially of, or consists of all or portions of the major CSA binding channel. In aspects the immunogen polypeptide comprises, consists essentially of, or consists of all or portions of the minor CSA binding channel. In aspects the immunogen polypeptide comprises, consists essentially of, or consists of all or portions of the arm segment. The immunogen polypeptide may comprise one or more conserved VAR2CSA binding channel residues as described above. In certain aspects, the conserved VAR2CSA binding channel residues are located in the major CSA binding channel of VAR2CSA.

[0181] In aspects, the method of treating or preventing cancer in a subject comprises, consists essentially of, or consists of obtaining an immunogen polypeptide having at least 80% identity with any one of SEQ ID NOs: 3-54. In aspects, the immunogen polypeptide comprises, consists essentially of, or consists of a polypeptide having at least 85% identity with any one of SEQ ID NOs: 3-54. In aspects, the immunogen polypeptide comprises, consists essentially of, or consists of a polypeptide having at least 90% identity with any one of SEQ ID NOs: 3-54. In aspects, the immunogen polypeptide comprises, consists essentially of, or consists of a polypeptide having at least 95% identity with any one of SEQ ID NOs: 3-54. In some aspects the immunogen polypeptide comprises, consists essentially of, or consists of any one of SEQ ID Nos: 3-54.

[0182] In aspects, the method of treating or preventing cancer in a subject comprises, consists essentially of, or consists of administering an effective amount of a pharmaceutical composition comprising the immunogen polypeptide. Examples of suitable pharmaceutical formulations are provided above. For the purposes of cancer treatment, compositions can be administered in dosages and by techniques well known to those skilled in the medical or veterinary arts, taking into consideration such factors as the age, sex, weight, species and condition of the recipient subject, and the route of administration.

[0183] In the context of methods of treating or preventing a disease (e.g. cancer), “therapeutically effective amount” refers to an amount that relieves (to some extent, as judged by a skilled medical practitioner) one or more symptoms of the disease or condition in a mammal, e.g. the symptoms of cancer. Additionally, by “therapeutically effective amount” is meant an amount that returns to normal, either partially or completely, physiological or biochemical parameters associated with or causative of a disease or condition. A clinician skilled in the art can determine the therapeutically effective amount of a composition in order to treat or prevent a particular disease condition. The precise amount of the composition required to be therapeutically effective will depend upon numerous factors, e. g., such as the specific activity of the active agent, the delivery device employed, physical characteristics of the agent, purpose for the administration, in addition to many patient specific considerations. The determination of amount of a composition that must be administered to be therapeutically effective is routine in the art and within the skill of an ordinarily skilled clinician.

[0184] The route of administration of the pharmaceutical composition in accordance with the methods of treating or preventing disease may be percutaneous, via mucosal administration (e.g., oral, nasal, anal, vaginal) or via a parenteral route (intradermal, intramuscular, subcutaneous, intravenous, or intraperitoneal). Compositions can be administered alone, or can be co-administered or sequentially administered with other treatments or therapies.

[0185] In aspects, forms of administration may include suspensions, syrups or elixirs, and preparations for parenteral, subcutaneous, intradermal, intramuscular or intravenous administration (e.g., injectable administration) such as sterile suspensions or emulsions. Vaccine compositions may be administered as a spray or mixed in food and/or water or delivered in admixture with a suitable carrier, diluent, or excipient such as sterile water, physiological saline, glucose, or the like. The compositions can contain auxiliary substances such as wetting or emulsifying agents, pH buffering agents, adjuvants, gelling or viscosity enhancing additives, preservatives, flavoring agents, colors, and the like, depending upon the route of administration and the preparation desired.

[0186] In aspects the composition used in the methods of treatment includes an additional therapeutic agent. Suitable additional therapeutic agents are described above. In aspects the additional therapeutic agent is an anti-cancer agent. In aspects, the additional therapeutic agent is conjugated or coupled to the immunogen polypeptide as described above. Accordingly, the disclosure also provides a method for delivering the additional therapeutic agent to the site of a disease in the subject. The disease site may be, for example, a tumor. In such aspects, the site of disease may be a tumor that expresses CSA.

[0187] In aspects of the disclosure, the methods of treatment can consist essentially of the methods of treatment as described herein, such that any variation does not materially change the characteristics of the method. In other aspects of the disclosure, the methods of treatment consist of the methods of treatment as described herein.

### Nucleic Acids

[0188] Aspects of the present disclosure include nucleic acids comprising regions encoding the disclosed immunogen polypeptides. Such nucleic acids may comprise DNA or RNA. In aspects, the nucleic acids may be isolated or purified. In other aspects the nucleic acids may not be isolated or purified. In aspects, the nucleic acid encodes an immunogen polypeptide having at least 80% identity with any one of SEQ ID NOs: 3-54. In other aspects, the nucleic acid may encode and immunogen polypeptide comprising any one of SEQ ID NOs: 3-54.

[0189] Aspects of the disclosure comprise a biological vector comprising nucleic acids encoding the immunogen polypeptide.

[0190] In aspects of the disclosure, the vector is a recombinant expression vector. For purposes herein, the term “recombinant expression vector” means a genetically-modified oligonucleotide or polynucleotide construct that permits the expression of an mRNA, protein, polypeptide, or peptide by a host cell, when the construct comprises, consists essentially of, or consists of a nucleotide sequence encoding the mRNA, protein, polypeptide, or peptide, and the vector is contacted with the cell under conditions sufficient to have the mRNA, protein, polypeptide, or peptide expressed within the cell. The vectors of the disclosure are not naturally-occurring as a whole. However, parts of the vectors can be naturally-occurring. The disclosed recombinant expression vectors can comprise any type of nucleotides, including, but not limited to DNA and RNA, which can be single-stranded or double-stranded, synthesized or obtained in part from natural sources, and which can contain natural, non-natural or altered nucleotides. The recombinant expression vectors can comprise naturally-occurring, non-naturally-occurring internucleotide linkages, or both types of linkages. Preferably, the non-naturally occurring or altered nucleotides or internucleotide linkages does not hinder the transcription or replication of the vector.

[0191] The recombinant expression vectors of the disclosure can be prepared using standard recombinant DNA techniques described in, for example, Green et al., supra. Constructs of expression vectors, which are circular or linear, can be prepared to contain a replication system functional in a prokaryotic or eukaryotic host cell. Replication systems can be derived, e.g., from ColEl, 2μ plasmid, λ, SV40, bovine papilloma virus, and the like.

[0192] The recombinant expression vector can include one or more marker genes, which allow for selection of transformed or transfected hosts. Marker genes include biocide resistance, e.g., resistance to antibiotics, heavy metals, etc., complementation in an auxotrophic host to provide prototrophy, and the like. Suitable marker genes for the disclosed expression vectors include, for instance, neomycin/G418 resistance genes, hygromycin resistance genes, histidinol resistance genes, tetracycline resistance genes, and ampicillin resistance genes.

[0193] The vector may further comprise regulatory sequences which are operably linked to the nucleotide sequence encoding the protein constructs which permits one or more of the transcription, translation, and expression protein constructs in a cell transfected with the vector or infected with a virus that comprises, consists essentially of, or consists of the vector. As used herein, “operably linked” sequences include both regulatory sequences that are contiguous with the nucleotide sequence encoding the protein construct and regulatory sequences that act in trans or at a distance to control the nucleotide sequence encoding the protein construct.

[0194] The regulatory sequences may include appropriate transcription initiation, termination, promoter and enhancer sequences; RNA processing signals such as splicing and polyadenylation (polyA) signal sequences; sequences that stabilize cytoplasmic mRNA; sequences that enhance translation efficiency (i.e., Kozak consensus sequence); sequences that enhance protein stability.

[0195] In aspects, the biological vector comprises, consists essentially of, or consists of a promotor that drives expression of the protein construct. The promoter may be any promoter suitable for expressing the protein construct in a target cell, e.g., a mammalian cell. The promoter may be inducible or constitutive. In aspects of the disclosure, the promoter is suitable for expressing the protein construct in a particular cell type. In this regard, the promoter may be cell-specific.

[0196] In some aspects the vector is a pcDNA3.1 vector.

[0197] In some aspects the vector is a viral vector. Examples of suitable viral vectors include retroviral vectors, lentiviral vectors, adenoviral vectors, adeno-associated viral (AAV) vectors.

[0198] In aspects of the disclosure, a nucleic acid with regions encoding the disclosed immunogen polypeptides may be formulated into a pharmaceutical composition. In aspects, such formulations may comprise a pharmaceutically acceptable carrier. Aspects of the disclosure include nucleic acid vaccine formulations comprising plasmid DNA, viral vectors or messenger RNA (mRNA) or modified messenger RNA (mmRNA) encoding the disclosed immunogen polypeptides.

[0199] Certain aspects of the disclosure include mRNA or mmRNA vaccine formulations wherein the mRNA or mmRNA contains a translatable region encoding the disclosed immunogen polypeptides. mmRNA may be modified in any suitable manner. Such modifications may include chemical modifications such as, for example, the inclusion of the modified nucleoside 1-methyl-pseudouridine. The modifications in mmRNA may function, e.g., to provide for increased polypeptide production and substantially reduced innate immune response in the cell, as compared to a composition comprising a corresponding unmodified mRNA. Methods for preparing and using mRNA, mmRNA and similar vaccine formulations are known in the art, and are described in, for example, U.S. Pat. No. 10,898,574, which is incorporated by reference in its entirety.

[0200] Aspects of the disclosure also include methods for producing the disclosed immunogen polypeptides in a cell in a subject, comprising administering to the subject a pharmaceutical composition comprising a modified messenger RNA (mmRNA) such that the mmRNA is introduced into the cell, wherein the mmRNA comprises a translatable region encoding the immunogen polypeptide.

[0201] Aspects of the disclosure also include methods of vaccinating subjects comprising administering a vaccine formulation comprising a nucleic acid with regions encoding the disclosed immunogen polypeptides, e.g., an mRNA or mmRNA vaccine formulation.

[0202] In aspects of the disclosure, the nucleic acids can consist essentially of the nucleic acids as described herein, such that any variation does not materially change the characteristics of the nucleic acids. In other aspects of the disclosure, the nucleic acids consist of the nucleic acids as described herein.

[0203] The following are aspects of the present disclosure:
[0204] 1. An immunogen polypeptide comprising:
[0205] a) all or a portion of the major CSA binding channels of VAR2CSA;
[0206] b) all or a portion of the minor CSA binding channels of VAR2CSA;
[0207] c) all or a portion of the arm segment of VAR2CSA; or
[0208] d) combinations thereof.
[0209] 2. The immunogen polypeptide of aspect 1, wherein the immunogen polypeptide comprises all or a portion of each of the NTS, DBL1X, DBL2X and DBL4ε regions of VAR2CSA.
[0210] 3. The immunogen polypeptide of aspects 1 or 2, wherein the VAR2CSA fragment comprises all or a portion of ID1.
[0211] 4. The immunogen polypeptide of any one of aspects 1-3, wherein the immunogen polypeptide comprises all or a portion of each of the ID2a and ID2b regions of VAR2CSA.
[0212] 5. The immunogen polypeptide of any one of aspect 1-4, wherein the immunogen polypeptide comprises all or a portion of each of the DBL3X region of VAR2CSA.
[0213] 6. The immunogen polypeptide of any one of aspects 1-5, wherein the immunogen polypeptide comprises all or a portion of the ID3 region of VAR2CSA.
[0214] 7. The immunogen polypeptide of aspect 1, wherein the immunogen polypeptide comprises one or more conserved CSA binding channel residues.
[0215] 8. The immunogen polypeptide of aspect 7, wherein the conserved CSA binding channel residues are located in the major CSA binding channels of VAR2CSA.
[0216] 9. The immunogen polypeptide of aspect 1, wherein the immunogen polypeptide comprises one or more amino acids corresponding to amino acids 44-46, 47-49, 556-558, 560-563, 575-577, 821-823, 827-836, 911-913, 951-953, 967-971, 1784-1786, 1879-1881, or 1888-1890 of SEQ ID NO: 1.
[0217] 10. The immunogen polypeptide of aspect 9, wherein the immunogen polypeptide comprises one or more amino acids corresponding to amino acids 45, 48, 557, 561, 562, 576, 822, 828, 829, 832, 835, 912, 952, 968, 970, 1785, 1880, 1889 of SEQ ID NO: 1.
[0218] 11. The immunogen polypeptide of aspect 1, wherein the immunogen polypeptide has at least 80% identity with any one of SEQ ID NOs: 3-54, and a pharmaceutically acceptable carrier.
[0219] 12. The immunogen polypeptide of aspect 11, wherein the immunogen polypeptide comprises any one of SEQ ID Nos: 3-54.
[0220] 13. The immunogen polypeptide of any one of aspects 1-12, wherein the immunogen polypeptide is isolated or purified.
[0221] 14. A pharmaceutical composition comprising one or more immunogen polypeptides according to any one of aspects 1-13, and a pharmaceutically acceptable carrier.
[0222] 15. The pharmaceutical composition of aspect 14, wherein the composition comprises multimers of the one or more immunogen polypeptides.
[0223] 16. The pharmaceutical composition of aspect 14 or 15, wherein the one or more immunogen polypeptides are in nanoparticle form.
[0224] 17. The pharmaceutical composition of any one of aspects 14-16, further comprising one or more additional therapeutic agents.
[0225] 18. The pharmaceutical composition of aspect 17, wherein the one or more additional therapeutic agents are coupled to the one or more immunogen polypeptides.
[0226] 19. The pharmaceutical composition of aspect 17 or 18, wherein the one or more additional therapeutic agents comprise an anti-cancer agent.
[0227] 20. The pharmaceutical composition of any one of aspects 14-19, wherein the composition is suitable for parenteral administration to a subject.
[0228] 21. A nucleic acid encoding one or more immunogen polypeptides according to any one of aspects 1-11, wherein the nucleic acid is isolated or purified.
[0229] 22. The nucleic acid of aspect 21, wherein the immunogen polypeptide has at least 80% identity with any one of SEQ ID NOs: 3-54.
[0230] 23. The nucleic acid of aspect 22, wherein the immunogen polypeptide comprises any one of SEQ ID NOs: 3-54.
[0231] 24. A vector comprising the nucleic acid of any one of aspects 21-23.
[0232] 25. A pharmaceutical composition comprising one or more nucleic acids according to any one of aspects 21-23, and a pharmaceutically acceptable carrier.
[0233] 26. The pharmaceutical composition of aspect 25, wherein the composition is suitable for parenteral administration to a subject.
[0234] 27. A composition for use in vaccinating a subject against malaria, the composition comprising:
[0235] a) one or more immunogen polypeptides according to any one of aspects 1-13, or one or more nucleic acids according to any one of aspects 21-23; and
[0236] b) a pharmaceutically acceptable carrier;
   wherein the pharmaceutical composition is administered to the subject.
[0237] 28. The composition for use of aspect 27, wherein the malaria is placental malaria.
[0238] 29. The composition for use of aspect 27 or 28, wherein the subject is a mammal.
[0239] 30. The composition for use of aspect 29, wherein the mammal is a human.
[0240] 31. The composition for use of any one of aspects 27-30 wherein the pharmaceutical composition is administered to the subject parenterally.
[0241] 32. The composition for use of any one of aspects 27-31, wherein the administration results in an immune response in the subject, and wherein the immune response in the subject is sufficient to reduce risk of malaria infection.
[0242] 33. The composition for use of aspect 32, wherein the immune response in the subject is strain transcending.
[0243] 34. A composition for use in treating or preventing cancer in a subject, the composition comprising:
[0244] a) an immunogen polypeptide according to any one of aspects 1-13; and
[0245] b) a pharmaceutically acceptable carrier;
   wherein the pharmaceutical composition is administered to the subject.
[0246] 35. The composition for use of aspect 34, wherein the subject is a mammal.
[0247] 36. The composition for use of aspect 35, wherein the mammal is a human.
[0248] 37. The composition for use of any one of aspects 34-36, wherein the pharmaceutical composition further comprises one or more additional therapeutic agents.
[0249] 38. The composition for use of aspect 37, wherein the one or more additional therapeutic agents are coupled to the immunogen polypeptide.
[0250] 39. The composition for use of aspect 37 or 38, wherein the one or more additional therapeutic agents comprises an anti-cancer agent.
[0251] 40. The composition for use of any one of aspects 34-39, wherein the pharmaceutical composition is administered to the subject parenterally.
[0252] 41. The composition for use of any one of aspects 34-40, wherein the cancer is a CSA expressing cancer.
[0253] 42. The composition for use of aspect 41, wherein the CSA expressing cancer is selected from colorectal cancer, lung cancer, breast cancer, prostate cancer, osteosarcoma, melanoma, diffuse gliomas and brain cancer.
[0254] 43. A method of producing an immunogen polypeptide of any one of aspects 1-13 in a cell in a subject in need thereof, comprising administering to the subject a pharmaceutical composition comprising a modified messenger RNA (mmRNA) such that the mmRNA is introduced into the cell, wherein the mmRNA comprises a translatable region encoding the immunogen polypeptide, and wherein the immunogen polypeptide is produced in the cell.

[0255] The following examples further illustrate the invention but, of course, should not be construed as in any way limiting its scope.

### EXAMPLE 1

[0256] This example describes a study identifying three dimensional structural characteristics of VAR2C SA and associated analysis.

[0257] The following methods were used in this Example:

### Purification of VAR2CSA NF54 and FCR3 in Expi293 Cells

[0258] The wild type VAR2CSA NF54 and VAR2CSA FCR3 were expressed in Expi293 (Thermo Fisher) cells according to the manufacturer's protocols. In brief, the cells were grown shaking at 37° C. and 8% CO2, maintaining cultures at continuous log phase growth (3.0-5×10⁶) for 3-4 passages after thawing. The day before transfection, 500 mL of culture was seeded at a density of 2.5-3×10⁶ cells/mL in a 2 L flask. The day of transfection, cells were diluted back to 2.5-3×10⁶ prior to transfection. The plasmid DNA was diluted with 25 mL of Opti-MEM I medium (Thermo Fisher) to a final concentration of 1 μg/mL.

[0259] Then, 1.4 ml ExpiFectamin™ 293 Reagent (Thermo Fisher) was diluted with 25 ml Opti-MEM I medium, gently mixed and incubated at room temperature for 5 minutes. The diluted ExpiFectamine™ 293 Reagent was then added to the diluted plasmid DNA, mixed by swirling, and incubated at room temperature for 20 minutes. The mixture was added to the cells slowly while swirling the flask. The flask was returned to the incubator at 37° C. and 8% CO2. After 20 hours of incubation, ExpiFectamine™ 293 Transfection Enhancer 1 (Thermo Fisher) and ExpiFectamine™ 293 Transfection Enhancer 2 (Thermo Fisher) were added to the transfection flask.

### Purification of VAR2CSA NF54 and FCR3

[0260] The cultures were centrifuged at 5000 rpm for 15 min five days post-transfection. The supernatant was collected and loaded onto Ni Sepharose® Excel columns (GE Healthcare), which were manually packed in a glass gravity column. The column was washed twice with 10 column volumes of wash buffer (25 mM HEPES, pH 7.4, 150 mM NaCl, 25 mM imidazole) and eluted with 5 column volumes of elution buffer (25 mM Tris-HCl, pH 7.4, 150 mM NaCl, 250 mM imidazole). The elutes were concentrated with a 100 kDa cutoff centrifugal filter unit (Millipore Sigma) to 1 ml and further purified by size-exclusion chromatography (Superose 6 Increase 10/300, GE Healthcare) in buffer A (10 mM HEPES, pH 7.4, 100 mM NaCl ). The peak fractions were collected and verified by SDS-PAGE before EM grids preparation.

### On-Column Crosslinking of VAR2CSA FCR3

[0261] In order to mildly stabilize the protein, on-column crosslinking of VAR2CSA FCR3 was performed as described. First, a bolus of glutaraldehyde (200 μl 0.25% v/v) was injected to a pre-equilibrated Superose 6 Increase 10/300 column in buffer A and run at 0.25 ml/min for 16 min (a total of 4 ml buffer). Then, the column flow was paused, and the injection loop was flushed using buffer followed by injection of purified VAR2CSA FCR3 (200 μl volume, at 3 μM concentration). Subsequently, the column was run at 0.25 ml/min and 0.3 ml fractions were collected for EM grids preparation.

### VAR2CSA-CSA Complex Reconstruction

[0262] The Chondroitin sulfate A sodium salt from bovine trachea (Sigma) was dissolved in buffer A to 10 mg/ml. Then VAR2CSA was mixed with CSA at a molar ratio of 1:4. The mixture was incubated on ice for 30 min before EM grids preparation.

### Cryo-EM Grid Preparation and Data Collection

[0263] The homogeneity of samples was first assessed by negative-stain EM with 0.7% (w/v) uranyl formate or 1% uranyl acetate as described. Before preparing grids for Cryo-EM, the freshly purified protein sample was centrifuged at 13,000 g for 2 min to remove potential protein aggregates, and the protein concentration was measured with a NanoDrop spectrophotometer (Thermos Fisher Scientific). The final protein concentration used for Cryo-EM grid preparation is 0.8 mg/ml.

[0264] The protein sample was kept on ice before grid preparation. A 3.5 μL aliquot of protein was applied to a glow-discharged Quantifoil 300 mesh 1.2/1.3 carbon grid (Quantifoil) that had been glow-discharged for 90 s at 10 mA with PELCO easiGlow Glow Discharge Set. VAR2CSA FCR3 and the VAR2CSA FCR3 cross-linked samples were blotted for 3 s and VAR2CSA NF54 CSA complex was blotted for 2 s with a blot force of 3 and 55/20 mm filter paper (TED PELLA) before plunged into liquid ethane with a Vitrobot Mark VI (FEI) set at 16° C. and 100% humidity. After screening multiple grids, three grids made with the samples VAR2CSA NF54 in complex with CSA, VAR2CSA FCR3 alone and the cross-linked VAR2CSA FCR3 were chosen for data collection based on the evaluation of data quality.

[0265] The NF54+CSA and FCR3 dataset were collected on the 300 keV Titan Krios with Gatan BioQuantum Image Filter in NIH National Cancer Institute (NCI)/NICE facility. The images were recorded with a 20 eV slit post-GIF K2 Summit camera in super-resolution counting mode at a nominal magnification of 130,000× and a defocus range from −0.7 to −2.0 μm. Exposures of 8 s were dose-fractionated into 40 frames (200 ms per frame), with an exposure rate of 8 electrons·pixel−1·s−1, resulting in a total exposure of 57 electrons·A−2, The data collection was automated using the SerialEM software package.

[0266] The FCR3 crosslink dataset was collected on Titan Krios electron microscopes in NIH Multi-Institute Cryo-EM Facility (MICEF). The images were recorded with a K2 Summit camera equipped with a Gatan Quantum LS imaging energy filter with the slit width set at 20 eV in counting mode at a nominal magnification of 130,000× and a defocus range from −1.0 to −2.0 μm. Exposures of lOs were dose-fractionated into 50 frames (200 ms per frame), with an exposure rate of 71.2 electrons·Å−2, The data collection was automated using the Leginon software package.

### Image Processing

[0267] 6,196 dose-fractionated movies of VAR2CSA NF54+CSA were collected. The processing was done within cryoSPARC (v2.14.2). Motion correction was done by cryoSPARC's Patch motion correction with an output F-crop factor of ½. CTF estimation for each micrograph was calculated with Patch CTF estimation. Particles were autopicked from each micrograph with the blob picker from cryoSPARC and then sorted by 2D classification for two rounds to exclude bad particles. 858,299 particles were selected. The particles were used to generate an ab initio map in cryoSPARC. Particles were classified into 5 classes using the low-pass-filtered (30 Å) ab initio map as a template. Class 1 and Class 4 with a total of 299,571 particles, which has a clear map of the core region, was selected to conduct NU-refinement and generated a 3.5 Å map. A mask covering core regions were then used to perform local refinement and generated a 3.36 Å map. The map of the core is local filtered with a b-factor of −76.4 in FIG. 1c. Class 1 which has a clear density of the whole protein were selected solely with 157,702 particles to perform NU-Refinement and generated a 3.87 Å map of the full length complex. A mask covering DBL5ε and 6ε regions were then used to perform local refinement and generated a 4.88 Å map.

[0268] 100,108 dose-fractionated movies of VAR2CSA FCR3 were collected on a 300-kV Titan Krios (FEI) equipped with a K2 Summit direct electron detector (Gatan). Similarly, the processing is done within cryoSPARC (v2.14.2). Motion correction was done by cryoSPARC's Patch motion correction with an output F-crop factor of ½. CTF estimation for each micrograph was calculated with Gctf (v1.06, https://www2.mrc-lmb.cam.ac.uk/research/locally-developed-software/zhang-software/). Particles were auto picked from each micrograph with the blob picker from cryoSPARC and then sorted by 2D classification for two rounds to exclude bad particles. 783,088 particles were selected. The dataset contained 783,088 particles. The particles were used to generate an ab initio map in cryoSPARC. Particles were classified into 10 classes using the low-pass-filtered (30 Å) ab initio map as a template. Class 4 with a total of 271,442 particles was selected to conduct NU-refinement and generated a 4 Å map. A mask covering DBL5ε and DBL6ε domains were then used to perform local refinement and generated a 4.69 Å map

[0269] 4,739 dose-fractionated movies of VAR2CSA FCR3 were collected. The processing was also done within cryoSPARC. Full frame motion correction was done by cryoSPARC's own implementation. CTF estimation for each micrograph was calculated with Gctf. 2,010,465 articles were auto picked from each micrograph with the blob picker from cryoSPARC and then sorted by 2D classification for two rounds to exclude bad particles. 505,409 particles were selected. The particles were used to generate an ab initio map in cryoSPARC. Particles were classified into 3 classes using the low-pass-filtered (30 Å) ab initio map as a template. Class 1 with a total of 319,520 particles was selected to conduct NU-refinement and generated a 3.52 Å map. A mask covering the core regions were then used to perform local refinement and generated a 3.38 Å map.

### Model Building and Refinement

[0270] First the model was built for the core of VAR2CSA FCR3 cross-linked. The crystal structures of DBL3X+4ε (PDB ID 4P1T) was used as a starting model and was fitted and refined into the Cryo-EM density map with PHENIX (v1.18.2) ‘Dock in map’ and ‘Real-space refinement. The successful docking and the clear fitting of the DBL3X+4 side chains with the density indicated the fitting was correct. The clear density of a α-helix (ID3) that connects the C-terminus of DBL4ε with the flexible arm which has a density of two tandem DBL domains helped us confirm the core is made up of DBL1X to DBL4ε while the arm is consists of DBL5ε and 6ε. The structures of DBL1X, DBL2X and ID2b were predicted from Phyre2 (http://www.sbg.bio.ic.ac.uk/˜phyre2/html/page.cgi?id=index) and then fitted and refined into the map by PHENIX (v1.18.2). The missing regions were manually built in COOT (v0.9). The atomic model for the core was refined using phenix.real_space_refine global minimization (default), morphing and simulated annealing rama potential.

[0271] The model of the VAR2CSA crosslink core was used to build the VAR2CSA FCR3 structure by docking the model into the VAR2CSA FCR3 map and auto refined by PHENIX. To build the arm region of VAR2CSA, the crystal structure of DBL6ε (PDB ID 2Y8D) and a predicted DBL5ε structure with Phyre2 was used. The structures were fit in the Cryo-EM density map from local refinement with Chimera using the “fit in map” tool. The atomic model for the arm was refined using phenix.real_space_refine global minimization (default), morphing and simulated annealing rama potential.

[0272] The model of core and arm region of CSA-VAR2CSA NF54 complex was built separately by fitting the corresponding model of VAR2CSA FCR3 into the map and manually mutating the residues and fragments adjustment. The CSA model was built with the C4S tetrasaccharide from the structure of the Shh-Chondroitin-4-Sulfate (C4S) Complex (PDB ID 4C4M). The atomic models was refined using phenix.real_space_refine global minimization (default), morphing and simulated annealing rama potential. The models of the core and arm were combined by fitting both of the maps together.

[0273] Structural and map figures were prepared in Chimera (v1.13.1, https://www.cgl.ucsf.edu/chimera/), ChimeraX (v1.0, https://www.rbvi.ucsf.edu/chimerax/) which are developed by UCSF, and PyMOL (v2.1, https://pymol.org /2/).

### Overall Structure of the CSA-VAR2CSA Complex

[0274] VAR2CSA was expressed from parasite strain NF54 (VAR2CSA NF54) in Expi293 cells and purified for the Cryo-EM study of VAR2CSA in complex with CSA 6,196 movies were collected allowing for a 3.82 Å reconstruction of VAR2CSA NF54 in complex with CSA (FIG. 8a). VAR2CSA NF54 exhibits an architecture comprised of a stable core and a flexible arm (FIG. 1a-c). Local refinement of the core improved the resolution to 3.36 Å, and local refinement of the arm resulted in a 4.88 Å map (FIG. 8a-f). A CSA dodecamer spans the core domain and binds in a channel termed the major binding channel (FIG. 1b-d). Another potential binding site for CSA was observed in a second channel termed the minor binding channel with weak density that could be modeled as a CSA monosaccharide (FIG. 1b, d). This binding of CSA polymer within channels of VAR2CSA is reminiscent of the binding model proposed for EBA-175 binding to glycophorin A during P. falciparum invasion of erythrocytes, where the glycophorin A receptor feeds through channels created by EBA-17530. EBA-175 is a protein related to VAR2CSA that belongs to the erythrocyte binding-like (EBL) family involved in the recognition of sialic acid on erythrocyte glycoproteins during erythrocyte invasion by P. falciparum. The inventor's final model for VAR2CSA NF54 spans residues 32 to 2607 of VAR2CSA NF54 with a few flexible loops and ID1 omitted as these segments were not ordered in the reconstruction (FIG. 1c, 8g-I). Table 2 provides Cryo-EM data.

TABLE 3
Cryo-EM data statistics.

| | VAR2CSA | | | | |
|---|---|---|---|---|---|
| | FCR3 | VAR2CSA | VAR2CSA | VAR2CSA | VAR2CSA |
| | (Crosslink) | FCR3 | FCR3 | NF54 + CSA | NF54 + CSA |
| | Core | Core | Arm | Core | Arm |
| Data collection and processing | | | | | |
| Magnification | 130,000 | 130,000 | 130,000 | 130,000 | 130,000 |
| Voltage(kV) | 300 | 300 | 300 | 300 | 300 |
| Electron exposure (e−/Å²) | 71.2 | 57 | 57 | 57 | 57 |
| Defocus range (μm) | −1.0 to −2.0 | −0.7 to −2.0 | −0.7 to −2.0 | −0.7 to −2.0 | −0.7 to −2.0 |
| Pixel size (Å) | 1.06 | 1.06 | 1.06 | 1.06 | 1.06 |
| Symmetry imposed | C1 | C1 | C1 | C1 | C1 |
| Initial particle images (no.) | 2,010,465 | 4,583,211 | 4,583,211 | 3,715,542 | 3,715,542 |
| Final particle images (no.) | 319,520 | 271,442 | 271,442 | 299,571 | 157,702 |
| Map resolution (Å) | | | | | |
| FSC threshold | 0.143 | 0.143 | 0.143 | 0.143 | 0.143 |
| Map resolution range (Å) | 3.38 | 4 | 4.69 | 3.36 | 4.88 |
| Refinement | | | | | |
| Initial model used (PDB code) | 4PIT | | 2Y8D | 4C4M | |
| Model resolution (Å) | 3.4 | 4.0 | 6.5 | 3.4 | 7.2 |
| 0.143 FSC threshold | | | | | |
| Map sharpening B factor (Å2) | −40.32 | −129.03 | −159.35 | −64.44 | −209.55 |
| Model composition | | | | | |
| Nonhydrogen atoms | 20361 | 20364 | 4521 | 19647 | 4357 |
| Protein residues | 1441 | 1441 | 537 | 1424 | 523 |
| Ligands | — | — | — | | |
| B factors (Å2) | | | | | |
| Protein | 65.07 | 26.17 | 46.87 | 22.33 | 462.86 |
| Ligand | — | — | — | 2.62 | |
| R.M.S. deviations | | | | | |
| Bond lengths (Å) | 0.001 | 0.001 | 0.003 | 0.001 | 0.002 |
| Bond angles (°) | 0.365 | 0.367 | 0.631 | 0.344 | 0.559 |
| Validation | | | | | |
| MolProbity score | 1.83 | 1.89 | 1.69 | 1.94 | 1.87 |
| Clashscore | 10.46 | 13.47 | 6.68 | 13.07 | 12.25 |
| Poor rotamers (%) | 0.54 | 0.00 | 0.00 | 0.54 | 0 |
| Ramachandran plot | | | | | |
| Favored (%) | 95.81 | 96.25 | 95.45 | 95.53 | 96.07 |
| Allowed (%) | 4.19 | 3.75 | 4.55 | 4.47 | 3.93 |
| Disallowed (%) | | | | | |

### An Interwoven Domain Architecture Stabilizes VAR2CSA

[0275] VAR2CSA is primarily composed of α-helices and extensive loops that adopt an overall shape resembling the number 7 (FIG. 1c). CryoSPARC 3D variability analysis confirms that the region composed of DBL2X to ID3 forms a relatively stable core, while DBL5ε-DBL6ε forms a flexible arm and DBL1X exhibits some structural flexibility. The 6 individual DBL domains of VAR2CSA adopt the classical DBL domain fold, consisting of an α-helical core decorated by extensive loops (FIG. 2a). The individual domains interact in an interwoven manner to stabilize the compact tertiary structure (FIG. 1c, d). DBL4ε, the most conserved DBL domain of the six, is located at the center of VAR2CSA and unites the whole structure by directly interacting with all the other domains except DBL1X and DBL5ε (FIG. 1c, d). DBL1X and DBL5ε are connected to DBL4ε via the NTS and ID3, respectively (FIG. 1c, d). The NTS (residue 32-49) is a twisted loop surrounding DBL1X and serves as the mortar holding together DBL1X and DBL4ε, with high conservation among diverse VAR2CSA strains (FIG. 2a-c). ID3 is a long helix that closely interacts with ID2 and connects DBL5ε with the core (FIG. 2a, d). A total of 31 pairs of disulfide bridges were identified in the final model (FIG. 2e and Table 3).

TABLE 4
Intra- and Inter - Domain disulfide bonds
Intra-domain disulfide bonds

| | |
|---|---|
| DBL1X | C51-C227, C66-C105, C151-C258 |
| DBL2X | C643-C745, C769-C901, C783-C801, C805-C955, C797- |
| | C957 |
| ID2a | C978-C996 |
| ID2b | C1088-C1193, C1140-C1171 |
| DBL3X | C1210-C1411, C1221-C1264, C1242-C1255, C1339- |
| | C1431, C1456-C1528, C1470-C1483, C1487-C1556 |
| DBL4ε | C1578-C1614, C1670-C1777, C1671-C1901, C1802- |
| | C1904, C1816-C1833, C1891-C1902 |
| ID3 | |
| DBL5ε | C2202-C2218 |
| DBL6ε | C2334-C2480, C2520-C2604, C2534-C2551, C2598-C2602 |

Inter-domain disulfide bonds

| | |
|---|---|
| ID2a-ID2b | C966-C1090 |
| DBL4X-ID3 | C1837-C1927 |

### Structural Conservation Within the EBL and PfEMP1 Families

[0276] The VAR2CSA structure represents the first characterized structure of a full-length PfEMP1 protein, and provides the first structural models for DBL1X, DBL2X, ID2a, ID2b, ID3 and DBL5ε (FIG. 2a). Structural alignments were performed for these domains using the DALI search. DBL1X, DBL2X and DBL5ε adopt structures similar to other DBL domains from PfEMP1 and EBA-175 (FIG. 9a-c). A tandem packing of the dual DBL domains DBL3X/4ε and DBL5ε/6ε was also observed. These dual DBL domains exhibit a twisted pattern reminiscent of other tandem packed DBL pairs of EBA-140 and EBA-175, although the angle between DBL domains differs (FIG. 9d-g). EBA-140 and EBA-175 both belong to the EBL family that mediates the recognition of sialic acid on erythrocyte glycoproteins.

[0277] The arrangement of DBL2X-ID2 represents a conserved architecture within the PfEMP1 protein family. The structure of DBL2X-ID2 from VAR2CSA is similar to the DBL1α-CIDRγ domains of PfEMP1-VarO, although they adopt different DBL-ID/CIDR orientation (FIG. 9h). VarO binds the ABO blood group trisaccharide that mediates rosetting of infected red blood cells. The individual DBL domains (DBL2X and DBL1α) are structurally similar, and the VAR2CSA ID2b domain has a strong similarity to the VarO CIDRγ subdomain 2 despite low sequence similarity (FIG. 9b, I, and j). The DBL-ID/CIDR angle differs between VAR2CSA and PfEMP1-VarO, but this tandem arrangement suggests that the DBL-ID/CIDR pairing among other PfEMP1 family members may have a similar architecture. These structural delineations will better inform and define the diverse PfElVIP1 domain architectures.

### Multiple Domains Within the Core Domains Create Major and Minor CSA-Binding Channels

[0278] The atomic resolution reconstructions provided assignment of a CSA polymer comprising twelve monomers bound in a positively charged channel that is formed by NTS, DBL1X, DBL2X and DBL4ε. (FIG. 3a,b). This channel is referred to herein as the major CSA binding channel. Five sulfated N-acetylgalactosamine-4-sulfate (ASG) and six glucuronic acid (BDP) residues were assigned and built into the density. Furthermore, density for an additional residue is observed at the start of the chain that can accommodate a monosaccharide, but this density was not of sufficient quality to facilitate adequate modeling of this single residue (FIG. 3a).

[0279] The major binding channel can be separated into two non-continuous CSA-binding sites (FIG. 3a). The first binding site (major binding site 1) is located on the surface of DBL2X and binds CSA residues BDP-8 to ASG-11 (FIG. 3a, c, d). The sulfate group of ASG-11 forms hydrogen bonds with N557 while BDP-10 has interactions with R829, K561 and the main chain of A822 (FIG. 3c). ASG-9 forms multiple hydrogen bonds with K562, N576, K828 and Q832 (FIG. 3d). The interaction of CSA with major binding site 1 is further strengthened by the hydrogen bonds between BDP-8 and K828 (FIG. 3d).

[0280] The second binding site (major binding site 2) lies deep in the hole of the funnel-shaped channel and is surrounded by NTS, DBL1X, DBL2X and DBL4ε (FIG. 3a, b). Multiple hydrogen bonds are also formed in this region: ASG-5 with K835, E1880 and K1889; BDP-4 with K48; ASG-3 with K48 and R846; BDP-2 with R846 and the main chain of 11785 (FIG. 3e). Y45 further stabilizes the interaction by packing tightly with BDP-2 (FIG. 3e). BDP-6 and ASG-7 do not exhibit direct interactions with VAR2CSA and may serve to link the two binding sites together (FIG. 3f).

[0281] Weak density (the size of a single ASG monosaccharide) was also identified in a separate region of VAR2CSA, which is referred to herein as the minor binding channel that forms a potential second binding site (FIG. 10a). The minor binding channel is made up of the residues from the C-terminus of DBL2X and N-terminus of ID2a, two regions previously implicated in CSA binding. Similar to the major binding channel, the minor channel is rich in positively charged residues (FIG. 10b).

[0282] The CSA-binding residues in both channels are highly conserved among different VAR2CSA alleles (FIG. 3g and FIG. 10c). In addition, while individual segments of VAR2CSA demonstrate CSA binding, the full-length protein binds CSA with far greater affinity than any segment alone. Without wishing to be bound by a particular theory, the structure described above provides rationale for these observations. DBL1X, DBL2X, ID2a, ID2b, DBL3X, DBL4ε and ID3 all interact extensively to create an interwoven architecture (FIG. 1b, d). The CSA binding is likely dependent on an intact core structure implicating multiple domains in high affinity CSA binding.

### VAR2CSA Adopts Preformed CSA-Binding Channels

[0283] In addition to the CSA-VAR2CSA complex, the structure of CSA-free VAR2CSA from the parasite strain FCR3 was also solved (FIGS. 7 and 11 and Table 2). The sequence of these two VAR2CSA alleles share a 79% identity (FIG. 4a). The structure of VAR2CSA FCR3 may potentially inform development of a strain-transcending vaccine by revealing any conformational changes due to CSA binding, as well as commonalities and differences between strains.

[0284] The Cryo-EM structure of the CSA-free full-length VAR2CSA FCR3 to a resolution of 4 Å after collecting 10,108 movies (FIG. 11a-c). The reconstructed map of apo VAR2CSA FCR3 exhibits a similar shape to the CSA bound VAR2CSA, and also resembles the number 7 with a stable core and flexible arm. Local refinement of the arm resulted in a 4.7 Å map (FIG. 11d). In order to further improve the resolution and the accuracy, the full-length ectodomain was cross-linked under mild conditions and collected a second dataset of 4,739 micrograph movies. This dataset resulted in a reconstruction of the stable core comprising DBL1X to ID3 to 3.4 Å resolution, enabling accurate model building for this segment that comprises the majority of VAR2CSA (FIG. 4b; 11e-g, 12, Table 2). The 4.7 Å reconstruction from masked local refinement of DBL5ε and 6ε allowed docking and refinement of the C-alpha positions of DBL5ε as well as the available crystal structure of DBL6ε (PDB:2Y8D) into this map (FIG. 12g). The final model for VAR2CSA FCR3 spans residues 23 to 2602 of VAR2CSA with a few flexible loops and ID1 omitted, as these segments were not ordered in the reconstruction (FIG. 12d). Comparison of the DBL1X-ID3 map generated from the cross-linked and non-cross-linked sample reveals no noticeable conformational changes in the core, indicating the crosslink did not affect conformation (FIG. 4c).

[0285] No major conformation changes were observed between the structures of CSA-bound and CSA-free VAR2CSA (FIG. 4c). The structural similarity between VAR2CSA FCR3 and NF54 also suggests different VAR2CSA variants are likely to have similar overall architecture (FIG. 4c). CSA could be well docked in the corresponding major and minor binding channels on VAR2CSA FCR3, which is similarly positively charged (FIG. 4c, d). This suggests that the CSA-binding mode identified herein is conserved between strains, and that VAR2CSA does not require major conformational changes to enable CSA binding. However, some flexibility is observed in the region DBL1X-DBL2X, suggesting limited flexing of the molecule may facilitate CSA binding.

### Analysis of VAR2CSA Variability and Placental Malaria Candidate Vaccine Designs

[0286] High sequence polymorphism among diverse VAR2CSA variants is one of the major barriers to strain-transcending vaccine development. The conservation of fourteen VAR2CSA sequences was analyzed and mapped onto the structure (FIG. 5a). Residues in the CSA-binding sites within the major and minor binding channels are conserved, but the flanking regions are not (FIG. 5b). Without wishing to be bound by a particular theory, the high conservation of the residues within both channels that directly bind CSA indicate these residues are under selective pressure to be maintained across strains. These results suggest that all strains retain these residues to ensure CSA binding. The variability observed in the flanking regions that are distant from the CSA-binding residues and do not directly contact CSA suggests that variability at these positions should not impact CSA binding, but may play a role in immune evasion.

[0287] The CSA-binding site 2 is buried deeply in the major binding channel and may not be accessible to antibodies (FIG. 5b). Although binding site 1 is exposed on the VAR2CSA surface, the DBL2X surface surrounding the conserved CSA binding channel residues is highly heterogeneous among diverse VAR2CSA strains (FIG. 5b). Moreover, there is also extensive polymorphism surrounding the conserved residues within the minor CSA binding channel (FIG. 5b). Other than the key CSA-binding residues, a large number of the surface residues are polymorphic among different VAR2CSA strains (FIG. 5a).

[0288] The interwoven domain architecture identified in the structure is consistent with the finding that multiple domains play a role in binding CSA, as multiple domains create the binding channels. The structure of full-length VAR2CSA described herein reveals larger CSA-binding sites with conserved targets for strain-transcending antibodies. This information will guide improvements on existing candidate vaccines and facilitate structure-based design of a strain-transcending placental malaria vaccine.

### Epitope Mapping on VAR2CSA

[0289] The structure of full-length VAR2CSA provided a template to investigate previously discovered antibody epitopes. Known epitopes were mapped on the structure (FIG. 6). Four multigravidae sera with neutralizing activity showed enhanced binding to distinct linear peptides using overlapping peptide scanning of DBL4ε. All the sera showed antibody binding to peptides P23-P25 and one sample also showed reactivity to peptides P45 and P57. Interestingly, mapping of these peptides on the 3D structure revealed all these peptides cluster together and are located at the entrance of the deeply buried binding site 2 of the major CSA binding channel (FIG. 6). Separately, naturally acquired antibodies to ID1-DBL2-ID2a and DBL4 recombinant constructs were found to have neutralizing activity against both homologous and heterologous isolates, and these results are consistent with the structural analysis identifying these domains as important for CSA binding. Other known epitopes of antibodies from multigravid women were mapped (FIG. 6). The epitopes of PAM8.1, which is an antibody derived from multigravid woman, was mapped to a strain-specific loop region on DBL3X. However, this loop is not visible in the structure (FIG. 6). Peptide P62 found within DBL3X and peptide P63 within DBL5ε are two peptides that react strongly with Tanzanian female plasma. Lastly, peptides P20 and P23 are two cryptic epitopes on DBL5ε which are shown to cross-react with the antibodies derived from Plasmodium vivax DBP (PvDBP). However, the neutralizing mechanisms of the antibodies that react to these epitopes requires further study.

### Discussion

[0290] The Cryo-EM structure of VAR2CSA in CSA-bound and CSA-free states determined here support a model of binding depicted in FIG. 6a. A major CSA-binding channel was identified that has two non-continuous CSA-binding sites, and a potential minor CSA-binding channel on VAR2CSA was identified, both of which are pre-formed by multiple domains. Although the CSA binding channel residues are highly conserved among various VAR2CSA alleles, a few CSA binding channel residues at the extremities of the binding sites exhibit polymorphism (FIG. 3g). In addition, the conserved residues are flanked by highly polymorphic residues (FIG. 5b). These variabilities may contribute to diverse binding affinity and PM severity of various VAR2CSA isolates. The surface-exposed binding site 1 of the major binding channel is formed solely by DBL2X (FIG. 3a). The buried binding site 2 of the major binding channel and the minor binding channel are formed by the NTS, DBL1X, DBL2X, ID2a and DBL4ε domains (FIG. 3a). The finding that DBL2X appears in all CSA-binding sites suggests its central role in CSA binding.

[0291] However, the multidomain binding model identifies all the CSA-binding regions and explains why the full-length VAR2CSA has much stronger CSA-binding affinity than any individual or short continuous domains (FIG. 13a). This study also identified DBL4ε as a key component of the CSA-binding channel. The binding residues of DBL4ε are buried in the hole of the channel and they work together with segments from the NTS, DBL1X and DBL2X to form the binding site 2 of the major binding channel.

[0292] The similar overall architecture of VAR2CSA from parasite strains NF54 and FCR3 implies that the VAR2CSA adopts a conserved shape. Some VAR2CSA proteins have been shown to have an additional DBL domain termed DBL7ε. This DBL domain would be connected to the C-terminus of DBL6ε that is fully solvent exposed and away from both the arm and core of all structures reported here. DBL7ε can readily be accommodated as an extension of the arm and is unlikely to alter the remaining architecture of VAR2CSA.

[0293] In the above study, CSA from bovine trachea was used, which consists of a mixture of CSA with different sulfation patterns and of different lengths. Although five of the CSA disaccharides are fully sulfated in the structure, the sulfation status of the first CSA monosaccharide was not determined. Since the CSA completely traverses through the binding channel of VAR2CSA, it is also plausible that VAR2CSA may slide along a CSA chain to search for a highly sulfated cluster prior to strong binding. Furthermore, the fact that CSA is tethered to the proteoglycan in the placenta might facilitate the binding of multiple CSA glycans to the different CSA binding channels on one VAR2CSA molecule or distinct VAR2CSA molecules that are located on a same knob.

[0294] The high variability of VAR2CSA from distinct P. falciparum strains poses a challenge to the development of strain-transcending vaccines for placental malaria. Mapping the VAR2CSA sequence variability onto the 3D structure of VAR2CSA shows the CSA-binding site 1 on DBL2X is highly conserved but is surrounded by highly polymorphic residues (FIG. 5b). This explains the low heterogenous neutralizing activity observed for the placental malaria candidate vaccines. The highly polymorphic segments likely impact antibodies that bind at or close to the CSA-binding sites, preventing the development of antibodies capable of binding to the VAR2CSA variants. The structure of VAR2CSA bound to CSA presented here serves as a template to design and develop vaccines against placental malaria that will overcome strain-specific responses by focusing the immune response to conserved regions.

[0295] Multiple pieces of evidence suggest the immunogens that encompass the region NTS-DBL2X can bind to antibodies from multigravid women living in pandemic regions, and can induce protective antibodies in clinical trials. The previously identified linear peptide epitopes on DBL4ε reside right next the major CSA binding channel. Accordingly, it is theorized that these linear peptides may be part of larger conformational epitopes that target the major CSA binding channel.

[0296] Interestingly, the form of CSA bound by VAR2CSA is exclusively expressed in the placenta in healthy individuals, but is expressed and presented in cells from diverse cancers of epithelial and mesenchymal origin. This expression allows for the specific targeting of cancer cells by delivering therapeutics that utilize VAR2CSA as a carrier, and for VAR2CSA-based cancer diagnostics. Clear structural definition of the functional segments from VAR2CSA required to bind CSA will lead to improvements for placental malaria vaccine development as well as cancer therapeutics and diagnostics (FIG. 13b). Improving the affinity of VAR2CSA fragments for cancer therapy by structure-guided design may allow for improved treatments that require lower doses for efficacy.

[0297] In summary, this example describes a study of VAR2CSA that defines the CSA-binding elements that comprise conserved segments of VAR2CSA to target for strain-transcending protective immunity. This information supports precise design of vaccines to provide much needed medical countermeasures against placental malaria and will inform the development of potent targeted cancer therapeutics and diagnostics.

### EXAMPLE 2

[0298] This example describes design and characterization of immunogen polypeptides comprising the CSA binding regions of VAR2CSA.

[0299] Sequences (SEQ ID NOS 3-54) were designed based on the structure of VAR2CSA elucidated by the inventors. These sequences are not found in nature. Photographs depicting the results of electrophoresis for the NF54 Core ΔDBL3 (“major and minor channels”, SEQ ID NO: 3), NF54 Core (SEQ ID NO: 5), NF54 DBL56 (“arm”, SEQ ID NO: 7), and FCR3 DBL56 (“arm”, SEQ ID NO: 8), are presented as FIG. 14.

[0300] The disclosed sequences may be used to produce recombinant immunogen polypeptides. Testing is contemplated to confirm that these peptides have improved affinity for CSA and may be used specifically for targeting CSA. The affinity will be further improved by development using multimers or nanoparticles to increase the avidity of binding. Disclosed sequences will be fused to polypeptide sequences that form multimers with 2 to 60 monomers per multimer. Improved CSA affinity will allow the immunogen polypeptides to specifically target CSA expressing cancer cell types.

[0301] Additionally, rodent studies is contemplated to confirm that the immunogen polypeptides induce an immune response, and allow test subjects to raise inhibitory antibodies.

### EXAMPLE 3

[0302] This example provides an overview of several novel immunogen polypeptides and investigations thereof according to the present disclosure.

[0303] The inventors have designed and produced novel immunogen polypeptides from the P. falciparum strains NF54 and FCR3 (See FIGS. 16A-C). These designs have been evaluated in preclinical animal studies for their ability to raise antibodies that prevent adherence of P. falciparum-infected red blood cells to CSA in standardized assays.

[0304] Preclinical studies in rats in combination with in vitro assays for CSA-based adherence of infected red cells are the standard in the field to evaluate novel placental malaria candidates. Animal studies were conducted in rats on immunogen polypeptides derived from the NF54 strain. Serology studies indicated that all of the immunogen polypeptides raise antibody titers greater than adjuvant control, and equal or greater antibody titers than the full-length VAR2CSA ectodomain control after three vaccinations.

[0305] Three of these disclosed immunogen polypeptides in particular show potential for further development: the “core”, the “major and minor channel”, and the “major channel”. As will be further described in subsequent Examples, these immunogens elicit strong strain-transcending inhibitory activity upon vaccination of rats. Studies were performed using an adjuvant suitable for translation to clinical studies and form a strong foundation for the further development of these candidates as vaccines.

### EXAMPLE 4

[0306] This Example confirms that the disclosed immunogen polypeptides are stable can be produced at yields equal to or greater than the native full length VAR2CSA ectodomain.

[0307] Multiple design were developed based on the VAR2CSA cryoEM structures and mechanisms of CSA binding described herein. Designs were developed based on VAR2CSA from both the NF54 and FCR3 strains.

[0308] SDS page analysis of the purified immunogens for the NF54 strains proves high purity of the purified recombinant immunogens (FIG. 17). Notably, the yields of the three lead immunogens (Core, Major and minor channels, and Major channel) are equal to or better than the Full length construct.

### EXAMPLE 5

[0309] This Example demonstrates the evaluation of disclosed immunogen polypeptides' ability to bind directly to CSA.

[0310] Structural and mechanistic studies suggest that the CSA binding activity is located in two channels within the Core domain (NTS to DBL4) of VAR2CSA, and the Arm segment (DBL5 and DBL6) is dispensable for binding. The ability of the protein designs to bind CSA was evaluated, and, consistent with the predicted model of binding, the core and the major and minor channels designs that contain both CSA-binding channels bound to CSA (FIG. 18). The Major channel design lacks one of the two CSA-binding channels (see FIGS. 16A and 16B) as expected binds CSA although binding is diminished compared to the Core and FL proteins (FIG. 18). The Arm did not bind CSA, again consistent with our model of binding where the domains in the Arm are not part of the CSA-binding channels. The Major channel min also lost binding suggesting the potential for an altered structure or lack of elements required for full binding.

### EXAMPLE 6

[0311] This Example demonstrates that the immunogenic polypeptides produce antibody titers greater than adjuvant control.

[0312] Rats are the model organism to evaluate placental malaria vaccine candidates. Rats were immunized with three doses of the disclosed immunogens using two different adjuvants, CFA/IFA and AddaS03. Vaccines were administered on days 0, 21 and 42, and samples were colleted on days 14, 35 and 63. All immunogens were first evaluated with CFA/IFA and those that showed inhibitory activity further tested using AddaS03 (see Example 8 below). Serology studies indicated that all immunogens raise antibody titers greater than adjuvant control, and equal to or greater than the full-length immunogen control after three vaccinations with CFA/IFA (FIG. 19).

### EXAMPLE 7

[0313] This Example demonstrates that disclosed immunogen polypeptides elicit antibodies that inhibit the homologous parasite strain.

[0314] Purified IgG from the serum of immunized rats were pooled and evaluated for the ability to prevent adherence of P. falciparum NF4-infected red blood cells to CSA using the standardized binding inhibition assay (BIA) developed to evaluate placental malaria vaccine candidates. Three designs, as well as the full length ectodomain control, showed robust BIA activity: the core, the major and minor channels, and the major channel. (FIGS. 20A and 20B.) In contrast the other designs, particularly the Arm, showed no activity in this assay. This is significant as a large fraction of the human antibody response is directed to domains in the Arm, and our studies indicate these antibodies are likely non-functional.

### EXAMPLE 8

[0315] This Example demonstrates that disclosed immunogen polypeptides showing activity upon immunization with CFA/IFA demonstrate strong activity with AddaS03.

[0316] AddaS03 (Invivogen, San Diego, CA) is the research grade equivalent of the clinical AS03 adjuvant approved for human use in multiple successful vaccines. The AddaS03 data presented below are particularly significant as they indicate our findings will be readily translated to human patients.

[0317] Selected immunogen polypeptides that demonstrated inhibitory activity with CFA/IFA were adjuvanted in AddaS03 and evaluated by immunization of rats. Vaccines were administered on days 0, 21 and 42, and samples were collected on days 14, 35 and 63. Serology studies indicated that all immunogens raise antibody titers greater than adjuvant control, and equal to or greater than the full-length immunogen control after three vaccinations. (FIG. 21.)

### EXAMPLE 9

[0318] This Example demonstrates that the core, major and minor channels, and major channel polypeptides adjuvanted in AddaS03 show strong homologous inhibitory activity in assays that are correlated with placental sequestration of parasites.

[0319] Purified IgG from the serum of immunized rats were pooled and evaluated for the ability to prevent adherence of P. falciparum NF4-infected red blood cells to CSA using the standardized binding inhibition assay (BIA) developed to evaluate placental malaria vaccine candidates. All three designs, as well as the full length ectodomain control, showed robust BIA activity. (FIG. 22A and 22B.)

### EXAMPLE 10

[0320] This Example demonstrates the examination of vaccination parameters

[0321] Immunogen polypeptides were formulated using either CFA/IFA or AddaS03. Differences in antibody titers elicited by each formulation are not statistically significant. (FIG. 23.) This indicates that AddaS03 may be a suitable adjuvant.

[0322] It was also determined that there are no statistical differences in the antibody titers between the second and third vaccination doses. (FIG. 24.) These data indicate a two vaccination regimen may be suitable. Further, immunogen polypeptides formulated with AddaS03 induce strong homologous inhibitory antibodies with either two or three vaccinations. (FIG. 25.)

[0323] All references, including publications, patent applications, and patents, cited herein are hereby incorporated by reference to the same extent as if each reference were individually and specifically indicated to be incorporated by reference and were set forth in its entirety herein.

[0324] The use of the terms “a” and “an” and “the” and “at least one” and similar referents in the context of describing the invention (especially in the context of the following claims) are to be construed to cover both the singular and the plural, unless otherwise indicated herein or clearly contradicted by context. The use of the term “at least one” followed by a list of one or more items (for example, “at least one of A and B”) is to be construed to mean one item selected from the listed items (A or B) or any combination of two or more of the listed items (A and B), unless otherwise indicated herein or clearly contradicted by context. The terms “comprising,” “having,” “including,” and “containing” are to be construed as open-ended terms (i.e., meaning “including, but not limited to,”) unless otherwise noted. Recitation of ranges of values herein are merely intended to serve as a shorthand method of referring individually to each separate value falling within the range, unless otherwise indicated herein, and each separate value is incorporated into the specification as if it were individually recited herein. All methods described herein can be performed in any suitable order unless otherwise indicated herein or otherwise clearly contradicted by context. The use of any and all examples, or exemplary language (e.g., “such as”) provided herein, is intended merely to better illuminate the invention and does not pose a limitation on the scope of the invention unless otherwise claimed. No language in the specification should be construed as indicating any non-claimed element as essential to the practice of the invention.

[0325] Preferred aspects of this invention are described herein, including the best mode known to the inventors for carrying out the invention. Variations of those preferred aspects may become apparent to those of ordinary skill in the art upon reading the foregoing description. The inventors expect skilled artisans to employ such variations as appropriate, and the inventors intend for the invention to be practiced otherwise than as specifically described herein. Accordingly, this invention includes all modifications and equivalents of the subject matter recited in the claims appended hereto as permitted by applicable law. Moreover, any combination of the above-described elements in all possible variations thereof is encompassed by the invention unless otherwise indicated herein or otherwise clearly contradicted by context.

1. An immunogen polypeptide comprising:
a) all or a portion of the major CSA binding channels of VAR2CSA;
b) all or a portion of the minor CSA binding channels of VAR2CSA;
c) all or a portion of the arm segment of VAR2CSA; or
d) combinations thereof.

2. The immunogen polypeptide of claim 1, wherein the immunogen polypeptide comprises all or a portion of each of the NTS, DBL1X, DBL2X and DBL4ε regions of VAR2CSA.

3. The immunogen polypeptide of claim 1, wherein the VAR2CSA fragment comprises all or a portion of ID1.

4. The immunogen polypeptide of claim 1, wherein the immunogen polypeptide comprises all or a portion of each of the ID2a and ID2b regions of VAR2CSA.

5. The immunogen polypeptide of claim 1, wherein the immunogen polypeptide comprises all or a portion of each of the DBL3X region of VAR2CSA.

6. The immunogen polypeptide of claim 1, wherein the immunogen polypeptide comprises all or a portion of the ID3 region of VAR2CSA.

7. The immunogen polypeptide of claim 1, wherein the immunogen polypeptide comprises one or more conserved CSA binding channel residues.

8. The immunogen polypeptide of claim 7, wherein the conserved CSA binding channel residues are located in the major CSA binding channels of VAR2CSA.

9. The immunogen polypeptide of claim 1, wherein the immunogen polypeptide comprises one or more amino acids corresponding to amino acids 44-46, 47-49, 556-558, 560- 563, 575-577, 821-823, 827-836, 911-913, 951-953, 967-971, 1784-1786, 1879-1881, or 1888-1890 of SEQ ID NO: 1.

10. The immunogen polypeptide of claim 9, wherein the immunogen polypeptide comprises one or more amino acids corresponding to amino acids 45, 48, 557, 561, 562, 576, 822, 828, 829, 832, 835, 912, 952, 968, 970, 1785, 1880, 1889 of SEQ ID NO: 1.

11. The immunogen polypeptide of claim 1, wherein the immunogen polypeptide has at least 80% identity with any one of SEQ ID NOs: 3-54, and a pharmaceutically acceptable carrier.

12. The immunogen polypeptide of claim 11, wherein the immunogen polypeptide comprises any one of SEQ ID Nos: 3-54.

13. The immunogen polypeptide of claim 1, wherein the immunogen polypeptide is isolated or purified.

14. A pharmaceutical composition comprising one or more immunogen polypeptides according to claim 1, and a pharmaceutically acceptable carrier.

15. The pharmaceutical composition of claim 14, wherein the composition comprises multimers of the one or more immunogen polypeptides.

16. The pharmaceutical composition of claim 14, wherein the one or more immunogen polypeptides are in nanoparticle form.

17. The pharmaceutical composition of claim 14, further comprising one or more additional therapeutic agents.

18. The pharmaceutical composition of claim 17, wherein the one or more additional therapeutic agents are coupled to the one or more immunogen polypeptides.

19. The pharmaceutical composition of claim 17, wherein the one or more additional therapeutic agents comprise an anti-cancer agent.

20. The pharmaceutical composition of claim 14, wherein the composition is suitable for parenteral administration to a subject

21. A nucleic acid encoding one or more immunogen polypeptides according to claim 1, wherein the nucleic acid is isolated or purified.

22. The nucleic acid of claim 21, wherein the immunogen polypeptide has at least 80% identity with any one of SEQ ID NOs: 3-54.

23. The nucleic acid of claim 22, wherein the immunogen polypeptide comprises any one of SEQ ID NOs: 3-54.

24. A vector comprising the nucleic acid of claim 21.

25. A pharmaceutical composition comprising one or more nucleic acids according to claim 21, and a pharmaceutically acceptable carrier.

26. The pharmaceutical composition of claim 25, wherein the composition is suitable for parenteral administration to a subject.

27. A method for vaccinating a subject against malaria, the method comprising
administering the composition of claim 14 to the subject.

28. The method of claim 27, wherein the malaria is placental malaria.

29. The mehtod of claim 27, wherein the subject is a mammal.

30. The method of claim 29, wherein the mammal is a human.

31. The method of claim 27, wherein the administration results in an immune response in the subject, and wherein the immune response in the subject is sufficient to reduce risk of malaria infection.

33. The method use of claim 32, wherein the immune response in the subject is strain transcending.

34-42. (canceled)

43. A method of producing an immunogen polypeptide of claim 1 in a cell in a subject in need thereof, comprising administering to the subject a pharmaceutical composition comprising a modified messenger RNA (mmRNA) such that the mmRNA is introduced into the cell, wherein the mmRNA comprises a translatable region encoding the immunogen polypeptide, and wherein the immunogen polypeptide is produced in the cell.

44. The immunogen polypeptide of claim 1, wherein the immunogen polypeptide comprises all or a portion of each of the NTS, DBL1X, ID1, DBL2X DBL4ε, and ID3 regions of VAR2CSA.

The application's sequence listing, which the Patent Office published only in electronic form, follows.

SEQUENCE LISTING (67 sequences)

SEQ ID NO: 1 - protein, 2642 aa, Plasmodium falciparum
MDKSSIANKIEAYLGAKSDDSKIDQSLKADPSEVQYYGSGGDGYYLRKNICKITVNHSDSGTNDPCDRIPPPYGDNDQWKCAIILSKVSEKPENVFVPPRRQRMCINNLEKLNVDKIRDKHAFLADVLLTARNEGERIVQNHPDTNSSNVCNALERSFADIADIIRGTDLWKGTNSNLEQNLKQMFAKIRENDKVLQDKYPKDQNYRKLREDWWNANRQKVWEVITCGARSNDLLIKRGWRTSGKSNGDNKLELCRKCGHYEEKVPTKLDYVPQFLRWLTEWIEDFYREKQNLIDDMERHREECTSEDHKSKEGTSYCSTCKDKCKKYCECVKKWKSEWENQKNKYTELYQQNKNETSQKNTSRYDDYVKDFFKKLEANYSSLENYIKGDPYFAEYATKLSFILNSSDANNPSEKIQKNNDEVCNCNESGIASVEQEQISDPSSNKTCITHSSIKANKKKVCKHVKLGVRENDKDLRVCVIEHTSLSGVENCCCQDFLRILQENCSDNKSGSSSNGSCNNKNQEACEKNLEKVLASLTNCYKCDKCKSEQSKKNNKNWIWKKSSGKEGGLQKEYANTIGLPPRTQSLCLVVCLDEKGKKTQELKNIRTNSELLKEWIIAAFHEGKNLKPSHEKKNDDNGKKLCKALEYSFADYGDLIKGTSIWDNEYTKDLELNLQKIFGKLFRKYIKKNNTAEQDTSYSSLDELRESWWNTNKKYIWLAMKHGAGMNSTTCCGDGSVTGSGSSCDDIPTIDLIPQYLRFLQEWVEHFCKQRQEKVKPVIENCKSCKESGGTCNGECKTECKNKCEVYKKFIEDCKGGDGTAGSSWVKRWDQIYKRYSKYIEDAKRNRKAGTKNCGPSSTTNAAENKCVQSDIDSFFKHLIDIGLTTPSSYLSIVLDDNICGADKAPWTTYTTYTTTEKCNKETDKSKLQQCNTAVVVNVPSPLGNTPHGYKYACQCKIPTNEETCDDRKEYMNQWSCGSARTMKRGYKNDNYELCKYNGVDVKPTTVRSNSSKLDDKDVTFFNLFEQWNKEIQYQIEQYMTNTKISCNNEKNVLSRVSDEAAQPKFSDNERDRNSITHEDKNCKEKCKCYSLWIEKINDQWDKQKDNYNKFQRKQIYDANKGSQNKKVVSLSNFLFFSCWEEYIQKYFNGDWSKIKNIGSDTFEFLIKKCGNDSGDGETIFSEKLNNAEKKCKENESTNNKMKSSETSCDCSEPIYIRGCQPKIYDGKIFPGKGGEKQWICKDTIIHGDTNGACIPPRTQNLCVGELWDKRYGGRSNIKNDTKESLKQKIKNAIQKETELLYEYHDKGTAIISRNPMKGQKEKEEKNNDSNGLPKGFCHAVQRSFIDYKNMILGTSVNIYEYIGKLQEDIKKIIEKGTTKQNGKTVGSGAENVNAWWKGIEGEMWDAVRCAITKINKKQKKNGTFSIDECGIFPPTGNDEDQSVSWFKEWSEQFCIERLQYEKNIRDACTNNGQGDKIQGDCKRKCEEYKKYISEKKQEWDKQKTKYENKYVGKSASDLLKENYPECISANFDFIFNDNIEYKTYYPYGDYSSICSCEQVKYYEYNNAEKKNNKSLCHEKGNDRTWSKKYIKKLENGRTLEGVYVPPRRQQLCLYELFPIIIKNKNDITNAKKELLETLQIVAEREAYYLWKQYHAHNDTTYLAHKKACCAIRGSFYDLEDIIKGNDLVHDEYTKYIDSKLNEIFDSSNKNDIETKRARTDWWENEAIAVPNITGANKSDPKTIRQLVWDAMQSGVRKAIDEEKEKKKPNENFPPCMGVQHIGIAKPQFIRWLEEWTNEFCEKYTKYFEDMKSNCNLRKGADDCDDNSNIECKKACANYTNWLNPKRIEWNGMSNYYNKIYRKSNKESEDGKDYSMIMEPTVIDYLNKRCNGEINGNYICCSCKNIGENSTSGTVNKKLQKKETQCEDNKGPLDLMNKVLNKMDPKYSEHKMKCTEVYLEHVEEQLKEIDNAIKDYKLYPLDRCFDDKSKMKVCDLIGDAIGCKHKTKLDELDEWNDVDMRDPYNKYKGVLIPPRRRQLCFSRIVRGPANLRNLKEFKEEILKGAQSEGKFLGNYYNEDKDKEKALEAMKNSFYDYEYIIKGSDMLTNIQFKDIKRKLDRLLEKETNNTEKVDDWWETNKKSIWNAMLCGYKKSGNKIIDPSWCTIPTTETPPQFLRWIKEWGTNVCIQKEEHKEYVKSKCSNVTNLGAQESESKNCTSEIKKYQEWSRKRSIQWEAISEGYKKYKGMDEFKNTFKNIKEPDANEPNANEYLKKHCSKCPCGFNDMQEITKYTNIGNEAFKQIKEQVDIPAELEDVIYRLKHHEYDKGNDYICNKYKNINVNMKKNNDDTWTDLVKNSSDINKGVLLPPRRKNLFLKIDESDICKYKRDPKLFKDFIYSSAISEVERLKKVYGEAKTKVVHAMKYSFADIGSIIKGDDMMENNSSDKIGKILGDGVGQNEKRKKWWDMNKYHIWESMLCGYKHAYGNISENDRKMLDIPNNDDEHQFLRWFQEWTENFCTKRNELYENMVTACNSAKCNTSNGSVDKKECTEACKNYSNFILIKKKEYQSLNSQYDMNYKETKAEKKESPEYFKDKCNGECSCLSEYFKDETRWKNPYETLDDTEVKNNCMCKPPPPASNN

SEQ ID NO: 2 - protein, 2649 aa, Plasmodium falciparum
MDSTSTIANKIEEYLGAKSDDSKIDELLKADPSEVEYYRSGGDGDYLKNNICKITVNHSDSGKYDPCEKKLPPYDDNDQWKCQQNSSDGSGKPENICVPPRRERLCTYNLENLKFDKIRDNNAFLADVLLTARNEGEKIVQNHPDTNSSNVCNALERSFADLADIIRGTDQWKGTNSNLEKNLKQMFAKIRENDKVLQDKYPKDQKYTKLREAWWNANRQKVWEVITCGARSNDLLIKRGWRTSGKSDRKKNFELCRKCGHYEKEVPTKLDYVPQFLRWLTEWIEDFYREKQNLIDDMERHREECTREDHKSKEGTSYCSTCKDKCKKYCECVKKWKTEWENQENKYKDLYEQNKNKTSQKNTSRYDDYVKDFFEKLEANYSSLENYIKGDPYFAEYATKLSFILNPSDANNPSGETANHNDEACNCNESGISSVGQAQTSGPSSNKTCITHSSIKTNKKKECKDVKLGVRENDKDLKICVIEDTSLSGVDNCCCQDLLGILQENCSDNKRGSSSNDSCDNKNQDECQKKLEKVFASLTNGYKCDKCKSGTSRSKKKWIWKKSSGNEEGLQEEYANTIGLPPRTQSLYLGNLPKLENVCEDVKDINFDTKEKFLAGCLIVSFHEGKNLKKRYPQNKNSGNKENLCKALEYSFADYGDLIKGTSIWDNEYTKDLELNLQNNFGKLFGKYIKKNNTAEQDTSYSSLDELRESWWNTNKKYIWTAMKHGAEMNITTCNADGSVTGSGSSCDDIPTIDLIPQYLRFLQEWVENFCEQRQAKVKDVITNCKSCKESGNKCKTECKTKCKDECEKYKKFIEACGTAGGGIGTAGSPWSKRWDQIYKRYSKHIEDAKRNRKAGTKNCGTSSTTNAAASTDENKCVQSDIDSFFKHLIDIGLTTPSSYLSNVLDDNICGADKAPWTTYTTYTTTEKCNKERDKSKSQSSDTLVVVNVPSPLGNTPYRYKYACQCKIPTNEETCDDRKEYMNQWSCGSARTMKRGYKNDNYELCKYNGVDVKPTTVRSNSSKLDGNDVTFFNLFEQWNKEIQYQIEQYMTNANISCIDEKEVLDSVSDEGTPKVRGGYEDGRNNNTDQGTNCKEKCKCYKLWIEKINDQWGKQKDNYNKFRSKQIYDANKGSQNKKVVSLSNFLFFSCWEEYIQKYFNGDWSKIKNIGSDTFEFLIKKCGNNSAHGEEIFNEKLKNAEKKCKENESTDTNINKSETSCDLNATNYIRGCQSKTYDGKIFPGKGGEKQWICKDTIIHGDTNGACIPPRTQNLCVGELWDKSYGGRSNIKNDTKELLKEKIKNAIHKETELLYEYHDTGTAIISKNDKKGQKGKNDPNGLPKGFCHAVQRSFIDYKNMILGTSVNIYEHIGKLQEDIKKIIEKGTPQQKDKIGGVGSSTENVNAWWKGIEREMWDAVRCAITKINKKNNNSIFNGDECGVSPPTGNDEDQSVSWFKEWGEQFCIERLRYEQNIREACTINGKNEKKCINSKSGQGDKIQGACKRKCEKYKKYISEKKQEWDKQKTKYENKYVGKSASDLLKENYPECISANFDFIFNDNIEYKTYYPYGDYSSICSCEQVKYYKYNNAEKKNNKSLCYEKDNDMTWSKKYIKKLENGRSLEGVYVPPRRQQLCLYELFPIIIKNEEGMEKAKEELLETLQIVAEREAYYLWKQYNPTGKGIDDANKKACCAIRGSFYDLEDIIKGNDLVHDEYTKYIDSKLNEIFGSSDTNDIDTKRARTDWWENETITNGTDRKTIRQLVWDAMQSGVRYAVEEKNENFPLCMGVEHIGIAKPQFIRWLEEWTNEFCEKYTKYFEDMKSKCDPPKRADTCGDNSNIECKKACANYTNWLNPKRIEWNGMSNYYNKIYRKSNKESEGGKDYSMIMAPTVIDYLNKRCHGEINGNYICCSCKNIGAYNTTSGTVNKKLQKKETECEEEKGPLDLMNEVLNKMDKKYSAHKMKCTEVYLEHVEEQLNEIDNAIKDYKLYPLDRCFDDQTKMKVCDLIADAIGCKDKTKLDELDEWNDMDLRGTYNKHKGVLIPPRRRQLCFSRIVRGPANLRSLNEFKEEILKGAQSEGKFLGNYYKEHKDKEKALEAMKNSFYDYEDIIKGTDMLTNIEFKDIKIKLDRLLEKETNNTKKAEDWWKTNKKSIWNAMLCGYKKSGNKIIDPSWCTIPTTETPPQFLRWIKEWGTNVCIQKQEHKEYVKSKCSNVTNLGAQASESNNCTSEIKKYQEWSRKRSIRWETISKRYKKYKRMDILKDVKEPDANTYLREHCSKCPCGFNDMEEMNNNEDNEKEAFKQIKEQVKIPAELEDVIYRIKHHEYDKGNDYICNKYKNIHDRMKKNNGNFVTDNFVKKSWEISNGVLIPPRRKNLFLYIDPSKICEYKKDPKLFKDFIYWSAFTEVERLKKAYGGARAKVVHAMKYSFTDIGSIIKGDDMMEKNSSDKIGKILGDTDGQNEKRKKWWDMNKYHIWESMLCGYREAEGDTETNENCRFPDIESVPQFLRWFQEWSENFCDRRQKLYDKLNSECISAECTNGSVDNSKCTHACVNYKNYILTKKTEYEIQTNKYDNEFKNKNSNDKDAPDYLKEKCNDNKCECLNKHIDDKNKTWKNPYETLEDTFKSKCDCPKPLPSPIKPDDLPPQADEPF

SEQ ID NO: 3 - protein, 1599 aa, Artificial Sequence
  synthetic
MDKSSIANKIEAYLGAKSDDSKIDQSLKADPSEVQYYGSGGDGYYLRKNICKITVNHSDSGTNDPCDRIPPPYGDNDQWKCAIILSKVSEKPENVFVPPRRQRMCINNLEKLNVDKIRDKHAFLADVLLTARNEGERIVQNHPDTNSSNVCNALERSFADIADIIRGTDLWKGTNSNLEQNLKQMFAKIRENDKVLQDKYPKDQNYRKLREDWWNANRQKVWEVITCGARSNDLLIKRGWRTSGKSNGDNKLELCRKCGHYEEKVPTKLDYVPQFLRWLTEWIEDFYREKQNLIDDMERHREECTSEDHKSKEGTSYCSTCKDKCKKYCECVKKWKSEWENQKNKYTELYQQNKNETSQKNTSRYDDYVKDFFKKLEANYSSLENYIKGDPYFAEYATKLSFILNSSDANNPSEKIQKNNDEVCNCNESGIASVEQEQISDPSSNKTCITHSSIKANKKKVCKHVKLGVRENDKDLRVCVIEHTSLSGVENCCCQDFLRILQENCSDNKSGSSSNGSCNNKNQEACEKNLEKVLASLTNCYKCDKCKSEQSKKNNKNWIWKKSSGKEGGLQKEYANTIGLPPRTQSLCLVVCLDEKGKKTQELKNIRTNSELLKEWIIAAFHEGKNLKPSHEKKNDDNGKKLCKALEYSFADYGDLIKGTSIWDNEYTKDLELNLQKIFGKLFRKYIKKNNTAEQDTSYSSLDELRESWWNTNKKYIWLAMKHGAGMNSTTCCGDGSVTGSGSSCDDIPTIDLIPQYLRFLQEWVEHFCKQRQEKVKPVIENCKSCKESGGTCNGECKTECKNKCEVYKKFIEDCKGGDGTAGSSWVKRWDQIYKRYSKYIEDAKRNRKAGTKNCGPSSTTNAAENKCVQSDIDSFFKHLIDIGLTTPSSYLSIVLDDNICGADKAPWTTYTTYTTTEKCNKETDKSKLQQCNTAVVVNVPSPLGNTPHGYKYACQCKIPTNEETCDDRKEYMNQWSCGSARTMKRGYKNDNYELCKYNGVDVKPTTVRSNSSKLDDKDVTFFNLFEQWNKEIQYQIEQYMTNTKISCNNEKNVLSRVSDEAAQPKFSDNERDRNSITHEDKNCKEKCKCYSLWIEKINDQWDKQKDNYNKFQRKQIYDANKGSQNKKVVSLSNFLFFSCWEEYIQKYFNGDWSKIKNIGSDTFEFLIKKCGNDSGDGETIFSEKLNNAEKKCKENESTNNKMKSSETSGSGSGAEKKNNKSLCHEKGNDRTWSKKYIKKLENGRTLEGVYVPPRRQQLCLYELFPIIIKNKNDITNAKKELLETLQIVAEREAYYLWKQYHAHNDTTYLAHKKACCAIRGSFYDLEDIIKGNDLVHDEYTKYIDSKLNEIFDSSNKNDIETKRARTDWWENEAIAVPNITGANKSDPKTIRQLVWDAMQSGVRKAIDEEKEKKKPNENFPPCMGVQHIGIAKPQFIRWLEEWTNEFCEKYTKYFEDMKSNCNLRKGADDCDDNSNIECKKACANYTNWLNPKRIEWNGMSNYYNKIYRKSNKESEDGKDYSMIMEPTVIDYLNKRCNGEINGNYICCSCKNIGENSTSGTVNKKLQKKETQCEDNKGPLDLMNKVLNKMDPKYSEHKM

SEQ ID NO: 4 - protein, 1596 aa, Artificial Sequence
  synthetic
MDSTSTIANKIEEYLGAKSDDSKIDELLKADPSEVEYYRSGGDGDYLKNNICKITVNHSDSGKYDPCEKKLPPYDDNDQWKCQQNSSDGSGKPENICVPPRRERLCTYNLENLKFDKIRDNNAFLADVLLTARNEGEKIVQNHPDTNSSNVCNALERSFADLADIIRGTDQWKGTNSNLEKNLKQMFAKIRENDKVLQDKYPKDQKYTKLREAWWNANRQKVWEVITCGARSNDLLIKRGWRTSGKSDRKKNFELCRKCGHYEKEVPTKLDYVPQFLRWLTEWIEDFYREKQNLIDDMERHREECTREDHKSKEGTSYCSTCKDKCKKYCECVKKWKTEWENQENKYKDLYEQNKNKTSQKNTSRYDDYVKDFFEKLEANYSSLENYIKGDPYFAEYATKLSFILNPSDANNPSGETANHNDEACNCNESGISSVGQAQTSGPSSNKTCITHSSIKTNKKKECKDVKLGVRENDKDLKICVIEDTSLSGVDNCCCQDLLGILQENCSDNKRGSSSNDSCDNKNQDECQKKLEKVFASLTNGYKCDKCKSGTSRSKKKWIWKKSSGNEEGLQEEYANTIGLPPRTQSLYLGNLPKLENVCEDVKDINFDTKEKFLAGCLIVSFHEGKNLKKRYPQNKNSGNKENLCKALEYSFADYGDLIKGTSIWDNEYTKDLELNLQNNFGKLFGKYIKKNNTAEQDTSYSSLDELRESWWNTNKKYIWTAMKHGAEMNITTCNADGSVTGSGSSCDDIPTIDLIPQYLRFLQEWVENFCEQRQAKVKDVITNCKSCKESGNKCKTECKTKCKDECEKYKKFIEACGTAGGGIGTAGSPWSKRWDQIYKRYSKHIEDAKRNRKAGTKNCGTSSTTNAAASTDENKCVQSDIDSFFKHLIDIGLTTPSSYLSNVLDDNICGADKAPWTTYTTYTTTEKCNKERDKSKSQSSDTLVVVNVPSPLGNTPYRYKYACQCKIPTNEETCDDRKEYMNQWSCGSARTMKRGYKNDNYELCKYNGVDVKPTTVRSNSSKLDGNDVTFFNLFEQWNKEIQYQIEQYMTNANISCIDEKEVLDSVSDEGTPKVRGGYEDGRNNNTDQGTNCKEKCKCYKLWIEKINDQWGKQKDNYNKFRSKQIYDANKGSQNKKVVSLSNFLFFSCWEEYIQKYFNGDWSKIKNIGSDTFEFLIKKCGNNSAHGEEIFNEKLKNAEKKCKENESTDTNINKSETSGSGSGAEKKNNKSLCYEKDNDMTWSKKYIKKLENGRSLEGVYVPPRRQQLCLYELFPIIIKNEEGMEKAKEELLETLQIVAEREAYYLWKQYNPTGKGIDDANKKACCAIRGSFYDLEDIIKGNDLVHDEYTKYIDSKLNEIFGSSDTNDIDTKRARTDWWENETITNGTDRKTIRQLVWDAMQSGVRYAVEEKNENFPLCMGVEHIGIAKPQFIRWLEEWTNEFCEKYTKYFEDMKSKCDPPKRADTCGDNSNIECKKACANYTNWLNPKRIEWNGMSNYYNKIYRKSNKESEGGKDYSMIMAPTVIDYLNKRCHGEINGNYICCSCKNIGAYNTTSGTVNKKLQKKETECEEEKGPLDLMNEVLNKMDKKYSAHKM

SEQ ID NO: 5 - protein, 1951 aa, Artificial Sequence
  synthetic
MDKSSIANKIEAYLGAKSDDSKIDQSLKADPSEVQYYGSGGDGYYLRKNICKITVNHSDSGTNDPCDRIPPPYGDNDQWKCAIILSKVSEKPENVFVPPRRQRMCINNLEKLNVDKIRDKHAFLADVLLTARNEGERIVQNHPDTNSSNVCNALERSFADIADIIRGTDLWKGTNSNLEQNLKQMFAKIRENDKVLQDKYPKDQNYRKLREDWWNANRQKVWEVITCGARSNDLLIKRGWRTSGKSNGDNKLELCRKCGHYEEKVPTKLDYVPQFLRWLTEWIEDFYREKQNLIDDMERHREECTSEDHKSKEGTSYCSTCKDKCKKYCECVKKWKSEWENQKNKYTELYQQNKNETSQKNTSRYDDYVKDFFKKLEANYSSLENYIKGDPYFAEYATKLSFILNSSDANNPSEKIQKNNDEVCNCNESGIASVEQEQISDPSSNKTCITHSSIKANKKKVCKHVKLGVRENDKDLRVCVIEHTSLSGVENCCCQDFLRILQENCSDNKSGSSSNGSCNNKNQEACEKNLEKVLASLTNCYKCDKCKSEQSKKNNKNWIWKKSSGKEGGLQKEYANTIGLPPRTQSLCLVVCLDEKGKKTQELKNIRTNSELLKEWIIAAFHEGKNLKPSHEKKNDDNGKKLCKALEYSFADYGDLIKGTSIWDNEYTKDLELNLQKIFGKLFRKYIKKNNTAEQDTSYSSLDELRESWWNTNKKYIWLAMKHGAGMNSTTCCGDGSVTGSGSSCDDIPTIDLIPQYLRFLQEWVEHFCKQRQEKVKPVIENCKSCKESGGTCNGECKTECKNKCEVYKKFIEDCKGGDGTAGSSWVKRWDQIYKRYSKYIEDAKRNRKAGTKNCGPSSTTNAAENKCVQSDIDSFFKHLIDIGLTTPSSYLSIVLDDNICGADKAPWTTYTTYTTTEKCNKETDKSKLQQCNTAVVVNVPSPLGNTPHGYKYACQCKIPTNEETCDDRKEYMNQWSCGSARTMKRGYKNDNYELCKYNGVDVKPTTVRSNSSKLDDKDVTFFNLFEQWNKEIQYQIEQYMTNTKISCNNEKNVLSRVSDEAAQPKFSDNERDRNSITHEDKNCKEKCKCYSLWIEKINDQWDKQKDNYNKFQRKQIYDANKGSQNKKVVSLSNFLFFSCWEEYIQKYFNGDWSKIKNIGSDTFEFLIKKCGNDSGDGETIFSEKLNNAEKKCKENESTNNKMKSSETSCDCSEPIYIRGCQPKIYDGKIFPGKGGEKQWICKDTIIHGDTNGACIPPRTQNLCVGELWDKRYGGRSNIKNDTKESLKQKIKNAIQKETELLYEYHDKGTAIISRNPMKGQKEKEEKNNDSNGLPKGFCHAVQRSFIDYKNMILGTSVNIYEYIGKLQEDIKKIIEKGTTKQNGKTVGSGAENVNAWWKGIEGEMWDAVRCAITKINKKQKKNGTFSIDECGIFPPTGNDEDQSVSWFKEWSEQFCIERLQYEKNIRDACTNNGQGDKIQGDCKRKCEEYKKYISEKKQEWDKQKTKYENKYVGKSASDLLKENYPECISANFDFIFNDNIEYKTYYPYGDYSSICSCEQVKYYEYNNAEKKNNKSLCHEKGNDRTWSKKYIKKLENGRTLEGVYVPPRRQQLCLYELFPIIIKNKNDITNAKKELLETLQIVAEREAYYLWKQYHAHNDTTYLAHKKACCAIRGSFYDLEDIIKGNDLVHDEYTKYIDSKLNEIFDSSNKNDIETKRARTDWWENEAIAVPNITGANKSDPKTIRQLVWDAMQSGVRKAIDEEKEKKKPNENFPPCMGVQHIGIAKPQFIRWLEEWTNEFCEKYTKYFEDMKSNCNLRKGADDCDDNSNIECKKACANYTNWLNPKRIEWNGMSNYYNKIYRKSNKESEDGKDYSMIMEPTVIDYLNKRCNGEINGNYICCSCKNIGENSTSGTVNKKLQKKETQCEDNKGPLDLMNKVLNKMDPKYSEH

SEQ ID NO: 6 - protein, 1957 aa, Artificial Sequence
  synthetic
MDSTSTIANKIEEYLGAKSDDSKIDELLKADPSEVEYYRSGGDGDYLKNNICKITVNHSDSGKYDPCEKKLPPYDDNDQWKCQQNSSDGSGKPENICVPPRRERLCTYNLENLKFDKIRDNNAFLADVLLTARNEGEKIVQNHPDTNSSNVCNALERSFADLADIIRGTDQWKGTNSNLEKNLKQMFAKIRENDKVLQDKYPKDQKYTKLREAWWNANRQKVWEVITCGARSNDLLIKRGWRTSGKSDRKKNFELCRKCGHYEKEVPTKLDYVPQFLRWLTEWIEDFYREKQNLIDDMERHREECTREDHKSKEGTSYCSTCKDKCKKYCECVKKWKTEWENQENKYKDLYEQNKNKTSQKNTSRYDDYVKDFFEKLEANYSSLENYIKGDPYFAEYATKLSFILNPSDANNPSGETANHNDEACNCNESGISSVGQAQTSGPSSNKTCITHSSIKTNKKKECKDVKLGVRENDKDLKICVIEDTSLSGVDNCCCQDLLGILQENCSDNKRGSSSNDSCDNKNQDECQKKLEKVFASLTNGYKCDKCKSGTSRSKKKWIWKKSSGNEEGLQEEYANTIGLPPRTQSLYLGNLPKLENVCEDVKDINFDTKEKFLAGCLIVSFHEGKNLKKRYPQNKNSGNKENLCKALEYSFADYGDLIKGTSIWDNEYTKDLELNLQNNFGKLFGKYIKKNNTAEQDTSYSSLDELRESWWNTNKKYIWTAMKHGAEMNITTCNADGSVTGSGSSCDDIPTIDLIPQYLRFLQEWVENFCEQRQAKVKDVITNCKSCKESGNKCKTECKTKCKDECEKYKKFIEACGTAGGGIGTAGSPWSKRWDQIYKRYSKHIEDAKRNRKAGTKNCGTSSTTNAAASTDENKCVQSDIDSFFKHLIDIGLTTPSSYLSNVLDDNICGADKAPWTTYTTYTTTEKCNKERDKSKSQSSDTLVVVNVPSPLGNTPYRYKYACQCKIPTNEETCDDRKEYMNQWSCGSARTMKRGYKNDNYELCKYNGVDVKPTTVRSNSSKLDGNDVTFFNLFEQWNKEIQYQIEQYMTNANISCIDEKEVLDSVSDEGTPKVRGGYEDGRNNNTDQGTNCKEKCKCYKLWIEKINDQWGKQKDNYNKFRSKQIYDANKGSQNKKVVSLSNFLFFSCWEEYIQKYFNGDWSKIKNIGSDTFEFLIKKCGNNSAHGEEIFNEKLKNAEKKCKENESTDTNINKSETSCDLNATNYIRGCQSKTYDGKIFPGKGGEKQWICKDTIIHGDTNGACIPPRTQNLCVGELWDKSYGGRSNIKNDTKELLKEKIKNAIHKETELLYEYHDTGTAIISKNDKKGQKGKNDPNGLPKGFCHAVQRSFIDYKNMILGTSVNIYEHIGKLQEDIKKIIEKGTPQQKDKIGGVGSSTENVNAWWKGIEREMWDAVRCAITKINKKNNNSIFNGDECGVSPPTGNDEDQSVSWFKEWGEQFCIERLRYEQNIREACTINGKNEKKCINSKSGQGDKIQGACKRKCEKYKKYISEKKQEWDKQKTKYENKYVGKSASDLLKENYPECISANFDFIFNDNIEYKTYYPYGDYSSICSCEQVKYYKYNNAEKKNNKSLCYEKDNDMTWSKKYIKKLENGRSLEGVYVPPRRQQLCLYELFPIIIKNEEGMEKAKEELLETLQIVAEREAYYLWKQYNPTGKGIDDANKKACCAIRGSFYDLEDIIKGNDLVHDEYTKYIDSKLNEIFGSSDTNDIDTKRARTDWWENETITNGTDRKTIRQLVWDAMQSGVRYAVEEKNENFPLCMGVEHIGIAKPQFIRWLEEWTNEFCEKYTKYFEDMKSKCDPPKRADTCGDNSNIECKKACANYTNWLNPKRIEWNGMSNYYNKIYRKSNKESEGGKDYSMIMAPTVIDYLNKRCHGEINGNYICCSCKNIGAYNTTSGTVNKKLQKKETECEEEKGPLDLMNEVLNKMDKKYSAH

SEQ ID NO: 7 - protein, 702 aa, Artificial Sequence
  synthetic
KMKCTEVYLEHVEEQLKEIDNAIKDYKLYPLDRCFDDKSKMKVCDLIGDAIGCKHKTKLDELDEWNDVDMRDPYNKYKGVLIPPRRRQLCFSRIVRGPANLRNLKEFKEEILKGAQSEGKFLGNYYNEDKDKEKALEAMKNSFYDYEYIIKGSDMLTNIQFKDIKRKLDRLLEKETNNTEKVDDWWETNKKSIWNAMLCGYKKSGNKIIDPSWCTIPTTETPPQFLRWIKEWGTNVCIQKEEHKEYVKSKCSNVTNLGAQESESKNCTSEIKKYQEWSRKRSIQWEAISEGYKKYKGMDEFKNTFKNIKEPDANEPNANEYLKKHCSKCPCGFNDMQEITKYTNIGNEAFKQIKEQVDIPAELEDVIYRLKHHEYDKGNDYICNKYKNINVNMKKNNDDTWTDLVKNSSDINKGVLLPPRRKNLFLKIDESDICKYKRDPKLFKDFIYSSAISEVERLKKVYGEAKTKVVHAMKYSFADIGSIIKGDDMMENNSSDKIGKILGDGVGQNEKRKKWWDMNKYHIWESMLCGYKHAYGNISENDRKMLDIPNNDDEHQFLRWFQEWTENFCTKRNELYENMVTACNSAKCNTSNGSVDKKECTEACKNYSNFILIKKKEYQSLNSQYDMNYKETKAEKKESPEYFKDKCNGECSCLSEYFKDETRWKNPYETLDDTEVKNNCMCKPPPPASNNTSDILQKTIPF

SEQ ID NO: 8 - protein, 692 aa, Artificial Sequence
  synthetic
KMKCTEVYLEHVEEQLNEIDNAIKDYKLYPLDRCFDDQTKMKVCDLIADAIGCKDKTKLDELDEWNDMDLRGTYNKHKGVLIPPRRRQLCFSRIVRGPANLRSLNEFKEEILKGAQSEGKFLGNYYKEHKDKEKALEAMKNSFYDYEDIIKGTDMLTNIEFKDIKIKLDRLLEKETNNTKKAEDWWKTNKKSIWNAMLCGYKKSGNKIIDPSWCTIPTTETPPQFLRWIKEWGTNVCIQKQEHKEYVKSKCSNVTNLGAQASESNNCTSEIKKYQEWSRKRSIRWETISKRYKKYKRMDILKDVKEPDANTYLREHCSKCPCGFNDMEEMNNNEDNEKEAFKQIKEQVKIPAELEDVIYRIKHHEYDKGNDYICNKYKNIHDRMKKNNGNFVTDNFVKKSWEISNGVLIPPRRKNLFLYIDPSKICEYKKDPKLFKDFIYWSAFTEVERLKKAYGGARAKVVHAMKYSFTDIGSIIKGDDMMEKNSSDKIGKILGDTDGQNEKRKKWWDMNKYHIWESMLCGYREAEGDTETNENCRFPDIESVPQFLRWFQEWSENFCDRRQKLYDKLNSECISAECTNGSVDNSKCTHACVNYKNYILTKKTEYEIQTNKYDNEFKNKNSNDKDAPDYLKEKCNDNKCECLNKHIDDKNKTWKNPYETLEDTFKSKCDCPKPLPSPIKPDDLPPQADEPF

SEQ ID NO: 9 - protein, 1355 aa, Artificial Sequence
  synthetic
MDKSSIANKIEAYLGAKSDDSKIDQSLKADPSEVQYYGSGGDGYYLRKNICKITVNHSDSGTNDPCDRIPPPYGDNDQWKCAIILSKVSEKPENVFVPPRRQRMCINNLEKLNVDKIRDKHAFLADVLLTARNEGERIVQNHPDTNSSNVCNALERSFADIADIIRGTDLWKGTNSNLEQNLKQMFAKIRENDKVLQDKYPKDQNYRKLREDWWNANRQKVWEVITCGARSNDLLIKRGWRTSGKSNGDNKLELCRKCGHYEEKVPTKLDYVPQFLRWLTEWIEDFYREKQNLIDDMERHREECTSEDHKSKEGTSYCSTCKDKCKKYCECVKKWKSEWENQKNKYTELYQQNKNETSQKNTSRYDDYVKDFFKKLEANYSSLENYIKGDPYFAEYATKLSFILNSSDANNPSEKIQKNNDEVCNCNESGIASVEQEQISDPSSNKTCITHSSIKANKKKVCKHVKLGVRENDKDLRVCVIEHTSLSGVENCCCQDFLRILQENCSDNKSGSSSNGSCNNKNQEACEKNLEKVLASLTNCYKCDKCKSEQSKKNNKNWIWKKSSGKEGGLQKEYANTIGLPPRTQSLCLVVCLDEKGKKTQELKNIRTNSELLKEWIIAAFHEGKNLKPSHEKKNDDNGKKLCKALEYSFADYGDLIKGTSIWDNEYTKDLELNLQKIFGKLFRKYIKKNNTAEQDTSYSSLDELRESWWNTNKKYIWLAMKHGAGMNSTTCCGDGSVTGSGSSCDDIPTIDLIPQYLRFLQEWVEHFCKQRQEKVKPVIENCKSCKESGGTCNGECKTECKNKCEVYKKFIEDCKGGDGTAGSSWVKRWDQIYKRYSKYIEDAKRNRKAGTKNCGPSSTTNAAENKCVQSDIDSFFKHLIDIGLTTPSSYLSIVLDDNICGADKAPWTTYTTYTTTEKCNKETDKSKLQQCNTAVVVNVPSPLGNTPHGYKYACQCKIPGGGGSGGGGSAEKKNNKSLCHEKGNDRTWSKKYIKKLENGRTLEGVYVPPRRQQLCLYELFPIIIKNKNDITNAKKELLETLQIVAEREAYYLWKQYHAHNDTTYLAHKKACCAIRGSFYDLEDIIKGNDLVHDEYTKYIDSKLNEIFDSSNKNDIETKRARTDWWENEAIAVPNITGANKSDPKTIRQLVWDAMQSGVRKAIDEEKEKKKPNENFPPCMGVQHIGIAKPQFIRWLEEWTNEFCEKYTKYFEDMKSNCNLRKGADDCDDNSNIECKKACANYTNWLNPKRIEWNGMSNYYNKIYRKSNKESEDGKDYSMIMEPTVIDYLNKRCNGEINGNYICCSCKNIGENSTSGTVNKKLQKKETQCEDNKGPLDLMNKVLNKMDPKYSEHKM

SEQ ID NO: 10 - protein, 1352 aa, Artificial Sequence
  synthetic
MDSTSTIANKIEEYLGAKSDDSKIDELLKADPSEVEYYRSGGDGDYLKNNICKITVNHSDSGKYDPCEKKLPPYDDNDQWKCQQNSSDGSGKPENICVPPRRERLCTYNLENLKFDKIRDNNAFLADVLLTARNEGEKIVQNHPDTNSSNVCNALERSFADLADIIRGTDQWKGTNSNLEKNLKQMFAKIRENDKVLQDKYPKDQKYTKLREAWWNANRQKVWEVITCGARSNDLLIKRGWRTSGKSDRKKNFELCRKCGHYEKEVPTKLDYVPQFLRWLTEWIEDFYREKQNLIDDMERHREECTREDHKSKEGTSYCSTCKDKCKKYCECVKKWKTEWENQENKYKDLYEQNKNKTSQKNTSRYDDYVKDFFEKLEANYSSLENYIKGDPYFAEYATKLSFILNPSDANNPSGETANHNDEACNCNESGISSVGQAQTSGPSSNKTCITHSSIKTNKKKECKDVKLGVRENDKDLKICVIEDTSLSGVDNCCCQDLLGILQENCSDNKRGSSSNDSCDNKNQDECQKKLEKVFASLTNGYKCDKCKSGTSRSKKKWIWKKSSGNEEGLQEEYANTIGLPPRTQSLYLGNLPKLENVCEDVKDINFDTKEKFLAGCLIVSFHEGKNLKKRYPQNKNSGNKENLCKALEYSFADYGDLIKGTSIWDNEYTKDLELNLQNNFGKLFGKYIKKNNTAEQDTSYSSLDELRESWWNTNKKYIWTAMKHGAEMNITTCNADGSVTGSGSSCDDIPTIDLIPQYLRFLQEWVENFCEQRQAKVKDVITNCKSCKESGNKCKTECKTKCKDECEKYKKFIEACGTAGGGIGTAGSPWSKRWDQIYKRYSKHIEDAKRNRKAGTKNCGTSSTTNAAASTDENKCVQSDIDSFFKHLIDIGLTTPSSYLSNVLDDNICGADKAPWTTYTTYTTTEKCNKERDKSKSQSSDTLVVVNVPSPLGNTPYRYKYACQCKIPGGGGSGGGGSAEKKNNKSLCYEKDNDMTWSKKYIKKLENGRSLEGVYVPPRRQQLCLYELFPIIIKNEEGMEKAKEELLETLQIVAEREAYYLWKQYNPTGKGIDDANKKACCAIRGSFYDLEDIIKGNDLVHDEYTKYIDSKLNEIFGSSDTNDIDTKRARTDWWENETITNGTDRKTIRQLVWDAMQSGVRYAVEEKNENFPLCMGVEHIGIAKPQFIRWLEEWTNEFCEKYTKYFEDMKSKCDPPKRADTCGDNSNIECKKACANYTNWLNPKRIEWNGMSNYYNKIYRKSNKESEGGKDYSMIMAPTVIDYLNKRCHGEINGNYICCSCKNIGAYNTTSGTVNKKLQKKETECEEEKGPLDLMNEVLNKMDKKYSAHKM

SEQ ID NO: 11 - protein, 1186 aa, Artificial Sequence
  synthetic
MDKSSIANKIEAYLGAKSDDSKIDQSLKADPSEVQYYGSGGDGYYLRKNICKITVNHSDSGTNDPCDRIPPPYGDNDQWKCAIILSKVSEKPENVFVPPRRQRMCINNLEKLNVDKIRDKHAFLADVLLTARNEGERIVQNHPDTNSSNVCNALERSFADIADIIRGTDLWKGTNSNLEQNLKQMFAKIRENDKVLQDKYPKDQNYRKLREDWWNANRQKVWEVITCGARSNDGSGSGLELCRKCGHYEEKVPTKLDYVPQFLRWLTEWIEDFYREKQNLIDDMERHREECTSEDHKSKEGTSYCSTCKDKCKKYCECVKKWKSEWENQKNKYTELYQQNKNETSQKNTSRYDDYVKDFFKKLEANYSSLENYIKGGGGSGGGGSGGGSKSEQSKKNNKNWIWKKSSGKEGGLQKEYANTIGLPPRTQSLCLVVCLDEKGKKTQELKNIRTNSELLKEWIIAAFHEGKNLKPSHEKKNDDNGKKLCKALEYSFADYGDLIKGTSIWDNEYTKDLELNLQKIFGKLFGGGGSSSLDELRESWWNTNKKYIWLAMKHGAGMNSTTCCGDGSVTGSGSSCDDIPTIDLIPQYLRFLQEWVEHFCKQRQEKVKPVIENCKSCKESGGTCNGECKTECKNKCEVYKKFIEDCKGGDGTAGSSWVKRWDQIYKRYSKYIEDAKRNRKAGTKNCGSGSGCVQSDIDSFFKHLIDIGLTTPSSYLSIVLDDNICGADKAPWTTYTTYTTTEKCNKETDKSKLQQCNTAVVVNVPSPLGNTPHGYKYACQCKIPGGGGSGGGGSGGSGSGAEKKNNKSLCHEKGNDRTWSKKYIKKLENGRTLEGVYVPPRRQQLCLYELFPIIIKNKNDITNAKKELLETLQIVAEREAYYLWKQYHAHNDTTYLAHKKACCAIRGSFYDLEDIIKGNDLVHDEYTKYIDSKLNEIFDSSNKNDIETKRARTDWWENEAIAVPNITGANKSDPKTIRQLVWDAMQSGVRKAIDEEKEKKKPNENFPPCMGVQHIGIAKPQFIRWLEEWTNEFCEKYTKYFEDMKSNCNLRKGADDCDDNSNIECKKACANYTNWLNPKRIEWNGMSNYYNKIYRKSNKESEDGKDYSMIMEPTVIDYLNKRCNGEINGNYICCSCKNIGENSTSGTVNKKLQKKETQCEDNKGPLDLMNKVLNKMDPKYSEHKM

SEQ ID NO: 12 - protein, 1186 aa, Artificial Sequence
  synthetic
MDSTSTIANKIEEYLGAKSDDSKIDELLKADPSEVEYYRSGGDGDYLKNNICKITVNHSDSGKYDPCEKKLPPYDDNDQWKCQQNSSDGSGKPENICVPPRRERLCTYNLENLKFDKIRDNNAFLADVLLTARNEGEKIVQNHPDTNSSNVCNALERSFADLADIIRGTDQWKGTNSNLEKNLKQMFAKIRENDKVLQDKYPKDQKYTKLREAWWNANRQKVWEVITCGARSNDLLIKRGWRTSGKSDRKKNFELCRKCGHYEKEVPTKLDYVPQFLRWLTEWIEDFYREKQNLIDDMERHREECTREDHKSKEGTSYCSTCKDKCKKYCECVKKWKTEWENQENKYKDLYEQNKNKTSQKNTSRYDDYVKDFFEKLEANYSSLENYIKGGGGSGGGGSGGGSKSGTSRSKKKWIWKKSSGNEEGLQEEYANTIGLPPRTQSLYLGNLPKLENVCEDVKDINFDTKEKFLAGCLIVSFHEGKNLKKRYPQNKNSGNKENLCKALEYSFADYGDLIKGTSIWDNEYTKDLELNLQNNFGKLFGGGGSSSLDELRESWWNTNKKYIWTAMKHGAEMNITTCNADGSVTGSGSSCDDIPTIDLIPQYLRFLQEWVENFCEQRQAKVKDVITNCKSCKESGNKCKTECKTKCKDECEKYKKFIEACGTAGGGIGTAGSPWSKRWDQIYKRYSKHIEDAKRNRKAGTKNCGGGGSCVQSDIDSFFKHLIDIGLTTPSSYLSNVLDDNICGADKAPWTTYTTYTTTEKCNKERDKSKSQSSDTLVVVNVPSPLGNTPYRYKYACQCKIPGGGGSGGGGSAEKKNNKSLCYEKDNDMTWSKKYIKKLENGRSLEGVYVPPRRQQLCLYELFPIIIKNEEGMEKAKEELLETLQIVAEREAYYLWKQYNPTGKGIDDANKKACCAIRGSFYDLEDIIKGNDLVHDEYTKYIDSKLNEIFGSSDTNDIDTKRARTDWWENETITNGTDRKTIRQLVWDAMQSGVRYAVEEKNENFPLCMGVEHIGIAKPQFIRWLEEWTNEFCEKYTKYFEDMKSKCDPPKRADTCGDNSNIECKKACANYTNWLNPKRIEWNGMSNYYNKIYRKSNKESEGGKDYSMIMAPTVIDYLNKRCHGEINGNYICCSCKNIGAYNTTSGTVNKKLQKKETECEEEKGPLDLMNEVLNKMDKKYSAHKM

SEQ ID NO: 13 - protein, 414 aa, Artificial Sequence
  synthetic
KSEQSKKNNKNWIWKKSSGKEGGLQKEYANTIGLPPRTQSLCLVVCLDEKGKKTQELKNIRTNSELLKEWIIAAFHEGKNLKPSHEKKNDDNGKKLCKALEYSFADYGDLIKGTSIWDNEYTKDLELNLQKIFGKLFRKYIKKNNTAEQDTSYSSLDELRESWWNTNKKYIWLAMKHGAGMNSTTCCGDGSVTGSGSSCDDIPTIDLIPQYLRFLQEWVEHFCKQRQEKVKPVIENCKSCKESGGTCNGECKTECKNKCEVYKKFIEDCKGGDGTAGSSWVKRWDQIYKRYSKYIEDAKRNRKAGTKNCGPSSTTNAAENKCVQSDIDSFFKHLIDIGLTTPSSYLSIVLDDNICGADKAPWTTYTTYTTTEKCNKETDKSKLQQCNTAVVVNVPSPLGNTPHGYKYACQCKIP

SEQ ID NO: 14 - protein, 422 aa, Artificial Sequence
  synthetic
KSGTSRSKKKWIWKKSSGNEEGLQEEYANTIGLPPRTQSLYLGNLPKLENVCEDVKDINFDTKEKFLAGCLIVSFHEGKNLKKRYPQNKNSGNKENLCKALEYSFADYGDLIKGTSIWDNEYTKDLELNLQNNFGKLFGKYIKKNNTAEQDTSYSSLDELRESWWNTNKKYIWTAMKHGAEMNITTCNADGSVTGSGSSCDDIPTIDLIPQYLRFLQEWVENFCEQRQAKVKDVITNCKSCKESGNKCKTECKTKCKDECEKYKKFIEACGTAGGGIGTAGSPWSKRWDQIYKRYSKHIEDAKRNRKAGTKNCGTSSTTNAAASTDENKCVQSDIDSFFKHLIDIGLTTPSSYLSNVLDDNICGADKAPWTTYTTYTTTEKCNKERDKSKSQSSDTLVVVNVPSPLGNTPYRYKYACQCKIP

SEQ ID NO: 15 - protein, 1807 aa, Artificial Sequence
  synthetic
MDKSSIANKIEAYLGAKSDDSKIDQSLKADPSEVQYYGSGGDGYYLRKNICKITVNHSDSGTNDPCDRIPPPYGDNDQWKCAIILSKVSEKPENVFVPPRRQRMCINNLEKLNVDKIRDKHAFLADVLLTARNEGERIVQNHPDTNSSNVCNALERSFADIADIIRGTDLWKGTNSNLEQNLKQMFAKIRENDKVLQDKYPKDQNYRKLREDWWNANRQKVWEVITCGARSNDLLIKRGWRTSGKSNGDNKLELCRKCGHYEEKVPTKLDYVPQFLRWLTEWIEDFYREKQNLIDDMERHREECTSEDHKSKEGTSYCSTCKDKCKKYCECVKKWKSEWENQKNKYTELYQQNKNETSQKNTSRYDDYVKDFFKKLEANYSSLENYIKGGGGSGGGGSGGGSKSEQSKKNNKNWIWKKSSGKEGGLQKEYANTIGLPPRTQSLCLVVCLDEKGKKTQELKNIRTNSELLKEWIIAAFHEGKNLKPSHEKKNDDNGKKLCKALEYSFADYGDLIKGTSIWDNEYTKDLELNLQKIFGKLFRKYIKKNNTAEQDTSYSSLDELRESWWNTNKKYIWLAMKHGAGMNSTTCCGDGSVTGSGSSCDDIPTIDLIPQYLRFLQEWVEHFCKQRQEKVKPVIENCKSCKESGGTCNGECKTECKNKCEVYKKFIEDCKGGDGTAGSSWVKRWDQIYKRYSKYIEDAKRNRKAGTKNCGPSSTTNAAENKCVQSDIDSFFKHLIDIGLTTPSSYLSIVLDDNICGADKAPWTTYTTYTTTEKCNKETDKSKLQQCNTAVVVNVPSPLGNTPHGYKYACQCKIPTNEETCDDRKEYMNQWSCGSARTMKRGYKNDNYELCKYNGVDVKPTTVRSNSSKLDDKDVTFFNLFEQWNKEIQYQIEQYMTNTKISCNNEKNVLSRVSDEAAQPKFSDNERDRNSITHEDKNCKEKCKCYSLWIEKINDQWDKQKDNYNKFQRKQIYDANKGSQNKKVVSLSNFLFFSCWEEYIQKYFNGDWSKIKNIGSDTFEFLIKKCGNDSGDGETIFSEKLNNAEKKCKENESTNNKMKSSETSCDCSEPIYIRGCQPKIYDGKIFPGKGGEKQWICKDTIIHGDTNGACIPPRTQNLCVGELWDKRYGGRSNIKNDTKESLKQKIKNAIQKETELLYEYHDKGTAIISRNPMKGQKEKEEKNNDSNGLPKGFCHAVQRSFIDYKNMILGTSVNIYEYIGKLQEDIKKIIEKGTTKQNGKTVGSGAENVNAWWKGIEGEMWDAVRCAITKINKKQKKNGTFSIDECGIFPPTGNDEDQSVSWFKEWSEQFCIERLQYEKNIRDACTNNGQGDKIQGDCKRKCEEYKKYISEKKQEWDKQKTKYENKYVGKSASDLLKENYPECISANFDFIFNDNIEYKTYYPYGDYSSICSCEQVKYYEYNNAEKKNNKSLCHEKGNDRTWSKKYIKKLENGRTLEGVYVPPRRQQLCLYELFPIIIKNKNDITNAKKELLETLQIVAEREAYYLWKQYHAHNDTTYLAHKKACCAIRGSFYDLEDIIKGNDLVHDEYTKYIDSKLNEIFDSSNKNDIETKRARTDWWENEAIAVPNITGANKSDPKTIRQLVWDAMQSGVRKAIDEEKEKKKPNENFPPCMGVQHIGIAKPQFIRWLEEWTNEFCEKYTKYFEDMKSNCNLRKGADDCDDNSNIECKKACANYTNWLNPKRIEWNGMSNYYNKIYRKSNKESEDGKDYSMIMEPTVIDYLNKRCNGEINGNYICCSCKNIGENSTSGTVNKKLQKKETQCEDNKGPLDLMNKVLNKMDPKYSEH

SEQ ID NO: 16 - protein, 1808 aa, Artificial Sequence
  synthetic
MDSTSTIANKIEEYLGAKSDDSKIDELLKADPSEVEYYRSGGDGDYLKNNICKITVNHSDSGKYDPCEKKLPPYDDNDQWKCQQNSSDGSGKPENICVPPRRERLCTYNLENLKFDKIRDNNAFLADVLLTARNEGEKIVQNHPDTNSSNVCNALERSFADLADIIRGTDQWKGTNSNLEKNLKQMFAKIRENDKVLQDKYPKDQKYTKLREAWWNANRQKVWEVITCGARSNDLLIKRGWRTSGKSDRKKNFELCRKCGHYEKEVPTKLDYVPQFLRWLTEWIEDFYREKQNLIDDMERHREECTREDHKSKEGTSYCSTCKDKCKKYCECVKKWKTEWENQENKYKDLYEQNKNKTSQKNTSRYDDYVKDFFEKLEANYSSLGGGGSGGGGSGGGSKSGTSRSKKKWIWKKSSGNEEGLQEEYANTIGLPPRTQSLYLGNLPKLENVCEDVKDINFDTKEKFLAGCLIVSFHEGKNLKKRYPQNKNSGNKENLCKALEYSFADYGDLIKGTSIWDNEYTKDLELNLQNNFGKLFGKYIKKNNTAEQDTSYSSLDELRESWWNTNKKYIWTAMKHGAEMNITTCNADGSVTGSGSSCDDIPTIDLIPQYLRFLQEWVENFCEQRQAKVKDVITNCKSCKESGNKCKTECKTKCKDECEKYKKFIEACGTAGGGIGTAGSPWSKRWDQIYKRYSKHIEDAKRNRKAGTKNCGTSSTTNAAASTDENKCVQSDIDSFFKHLIDIGLTTPSSYLSNVLDDNICGADKAPWTTYTTYTTTEKCNKERDKSKSQSSDTLVVVNVPSPLGNTPYRYKYACQCKIPTNEETCDDRKEYMNQWSCGSARTMKRGYKNDNYELCKYNGVDVKPTTVRSNSSKLDGNDVTFFNLFEQWNKEIQYQIEQYMTNANISCIDEKEVLDSVSDEGTPKVRGGYEDGRNNNTDQGTNCKEKCKCYKLWIEKINDQWGKQKDNYNKFRSKQIYDANKGSQNKKVVSLSNFLFFSCWEEYIQKYFNGDWSKIKNIGSDTFEFLIKKCGNNSAHGEEIFNEKLKNAEKKCKENESTDTNINKSETSCDLNATNYIRGCQSKTYDGKIFPGKGGEKQWICKDTIIHGDTNGACIPPRTQNLCVGELWDKSYGGRSNIKNDTKELLKEKIKNAIHKETELLYEYHDTGTAIISKNDKKGQKGKNDPNGLPKGFCHAVQRSFIDYKNMILGTSVNIYEHIGKLQEDIKKIIEKGTPQQKDKIGGVGSSTENVNAWWKGIEREMWDAVRCAITKINKKNNNSIFNGDECGVSPPTGNDEDQSVSWFKEWGEQFCIERLRYEQNIREACTINGKNEKKCINSKSGQGDKIQGACKRKCEKYKKYISEKKQEWDKQKTKYENKYVGKSASDLLKENYPECISANFDFIFNDNIEYKTYYPYGDYSSICSCEQVKYYKYNNAEKKNNKSLCYEKDNDMTWSKKYIKKLENGRSLEGVYVPPRRQQLCLYELFPIIIKNEEGMEKAKEELLETLQIVAEREAYYLWKQYNPTGKGIDDANKKACCAIRGSFYDLEDIIKGNDLVHDEYTKYIDSKLNEIFGSSDTNDIDTKRARTDWWENETITNGTDRKTIRQLVWDAMQSGVRYAVEEKNENFPLCMGVEHIGIAKPQFIRWLEEWTNEFCEKYTKYFEDMKSKCDPPKRADTCGDNSNIECKKACANYTNWLNPKRIEWNGMSNYYNKIYRKSNKESEGGKDYSMIMAPTVIDYLNKRCHGEINGNYICCSCKNIGAYNTTSGTVNKKLQKKETECEEEKGPLDLMNEVLNKMDKKYSAH

SEQ ID NO: 17 - protein, 1455 aa, Artificial Sequence
  synthetic
MDKSSIANKIEAYLGAKSDDSKIDQSLKADPSEVQYYGSGGDGYYLRKNICKITVNHSDSGTNDPCDRIPPPYGDNDQWKCAIILSKVSEKPENVFVPPRRQRMCINNLEKLNVDKIRDKHAFLADVLLTARNEGERIVQNHPDTNSSNVCNALERSFADIADIIRGTDLWKGTNSNLEQNLKQMFAKIRENDKVLQDKYPKDQNYRKLREDWWNANRQKVWEVITCGARSNDLLIKRGWRTSGKSNGDNKLELCRKCGHYEEKVPTKLDYVPQFLRWLTEWIEDFYREKQNLIDDMERHREECTSEDHKSKEGTSYCSTCKDKCKKYCECVKKWKSEWENQKNKYTELYQQNKNETSQKNTSRYDDYVKDFFKKLEANYSSLENYIKGGGGSGGGGSGGGSKSEQSKKNNKNWIWKKSSGKEGGLQKEYANTIGLPPRTQSLCLVVCLDEKGKKTQELKNIRTNSELLKEWIIAAFHEGKNLKPSHEKKNDDNGKKLCKALEYSFADYGDLIKGTSIWDNEYTKDLELNLQKIFGKLFRKYIKKNNTAEQDTSYSSLDELRESWWNTNKKYIWLAMKHGAGMNSTTCCGDGSVTGSGSSCDDIPTIDLIPQYLRFLQEWVEHFCKQRQEKVKPVIENCKSCKESGGTCNGECKTECKNKCEVYKKFIEDCKGGDGTAGSSWVKRWDQIYKRYSKYIEDAKRNRKAGTKNCGPSSTTNAAENKCVQSDIDSFFKHLIDIGLTTPSSYLSIVLDDNICGADKAPWTTYTTYTTTEKCNKETDKSKLQQCNTAVVVNVPSPLGNTPHGYKYACQCKIPTNEETCDDRKEYMNQWSCGSARTMKRGYKNDNYELCKYNGVDVKPTTVRSNSSKLDDKDVTFFNLFEQWNKEIQYQIEQYMTNTKISCNNEKNVLSRVSDEAAQPKFSDNERDRNSITHEDKNCKEKCKCYSLWIEKINDQWDKQKDNYNKFQRKQIYDANKGSQNKKVVSLSNFLFFSCWEEYIQKYFNGDWSKIKNIGSDTFEFLIKKCGNDSGDGETIFSEKLNNAEKKCKENESTNNKMKSSETSGSGSGAEKKNNKSLCHEKGNDRTWSKKYIKKLENGRTLEGVYVPPRRQQLCLYELFPIIIKNKNDITNAKKELLETLQIVAEREAYYLWKQYHAHNDTTYLAHKKACCAIRGSFYDLEDIIKGNDLVHDEYTKYIDSKLNEIFDSSNKNDIETKRARTDWWENEAIAVPNITGANKSDPKTIRQLVWDAMQSGVRKAIDEEKEKKKPNENFPPCMGVQHIGIAKPQFIRWLEEWTNEFCEKYTKYFEDMKSNCNLRKGADDCDDNSNIECKKACANYTNWLNPKRIEWNGMSNYYNKIYRKSNKESEDGKDYSMIMEPTVIDYLNKRCNGEINGNYICCSCKNIGENSTSGTVNKKLQKKETQCEDNKGPLDLMNKVLNKMDPKYSEHKM

SEQ ID NO: 18 - protein, 1447 aa, Artificial Sequence
  synthetic
MDSTSTIANKIEEYLGAKSDDSKIDELLKADPSEVEYYRSGGDGDYLKNNICKITVNHSDSGKYDPCEKKLPPYDDNDQWKCQQNSSDGSGKPENICVPPRRERLCTYNLENLKFDKIRDNNAFLADVLLTARNEGEKIVQNHPDTNSSNVCNALERSFADLADIIRGTDQWKGTNSNLEKNLKQMFAKIRENDKVLQDKYPKDQKYTKLREAWWNANRQKVWEVITCGARSNDLLIKRGWRTSGKSDRKKNFELCRKCGHYEKEVPTKLDYVPQFLRWLTEWIEDFYREKQNLIDDMERHREECTREDHKSKEGTSYCSTCKDKCKKYCECVKKWKTEWENQENKYKDLYEQNKNKTSQKNTSRYDDYVKDFFEKLEANYSSLGGGGSGGGGSGGGSKSGTSRSKKKWIWKKSSGNEEGLQEEYANTIGLPPRTQSLYLGNLPKLENVCEDVKDINFDTKEKFLAGCLIVSFHEGKNLKKRYPQNKNSGNKENLCKALEYSFADYGDLIKGTSIWDNEYTKDLELNLQNNFGKLFGKYIKKNNTAEQDTSYSSLDELRESWWNTNKKYIWTAMKHGAEMNITTCNADGSVTGSGSSCDDIPTIDLIPQYLRFLQEWVENFCEQRQAKVKDVITNCKSCKESGNKCKTECKTKCKDECEKYKKFIEACGTAGGGIGTAGSPWSKRWDQIYKRYSKHIEDAKRNRKAGTKNCGTSSTTNAAASTDENKCVQSDIDSFFKHLIDIGLTTPSSYLSNVLDDNICGADKAPWTTYTTYTTTEKCNKERDKSKSQSSDTLVVVNVPSPLGNTPYRYKYACQCKIPTNEETCDDRKEYMNQWSCGSARTMKRGYKNDNYELCKYNGVDVKPTTVRSNSSKLDGNDVTFFNLFEQWNKEIQYQIEQYMTNANISCIDEKEVLDSVSDEGTPKVRGGYEDGRNNNTDQGTNCKEKCKCYKLWIEKINDQWGKQKDNYNKFRSKQIYDANKGSQNKKVVSLSNFLFFSCWEEYIQKYFNGDWSKIKNIGSDTFEFLIKKCGNNSAHGEEIFNEKLKNAEKKCKENESTDTNINKSETSGSGSGAEKKNNKSLCYEKDNDMTWSKKYIKKLENGRSLEGVYVPPRRQQLCLYELFPIIIKNEEGMEKAKEELLETLQIVAEREAYYLWKQYNPTGKGIDDANKKACCAIRGSFYDLEDIIKGNDLVHDEYTKYIDSKLNEIFGSSDTNDIDTKRARTDWWENETITNGTDRKTIRQLVWDAMQSGVRYAVEEKNENFPLCMGVEHIGIAKPQFIRWLEEWTNEFCEKYTKYFEDMKSKCDPPKRADTCGDNSNIECKKACANYTNWLNPKRIEWNGMSNYYNKIYRKSNKESEGGKDYSMIMAPTVIDYLNKRCHGEINGNYICCSCKNIGAYNTTSGTVNKKLQKKETECEEEKGPLDLMNEVLNKMDKKYSAHKM

SEQ ID NO: 19 - protein, 1975 aa, Artificial Sequence
  synthetic
MDKSSIGDKIEEYLKEKSDDSKIDELLKADPSEVEYYRSGGDGDYLKNNICKITVNHSDSGKYEPCDRIPPPYGDNDQWKCQQNLYKASENNKNVFVPPRRQRMCINNLENLNVERIRDKHAFLADVLLTARNEGERIVQNHPDTNSSNVCIALERSFADIADIIRGRDGNKCETKSTNNVEELIKKFFEKNYRENKEYKRKYPNDDPKYTKLREDWWTKNRQKVWEVITCGARSNDLLIKRGWTTSKESEGENKLELCRKCGHYEEKVPTKLDYVPQFLRWLTEWIEDLYREKQNLIDDMERHREECTSEDHKSKEGASYCNMCKDKCKKYCECVKKWKSEWENQKNKYKDLYQQENETSSSSKKKSRYDDYVKEFFKKLNEANYSSLENYIKDDPYSKEYVTKLSFIPNSSDANTSSEKIQKNNDEVCNPNESGISSVEQAQTSGPSSNKTCITHSSIKANKKKECKDVKLGVRENDKDLKICVIEDTSLSGVDNCCCQDLLGILQENCSDNKRGSSSNDSCDNKNQDECQKKLDEALESLHNGYKNQKCKSGTSTVNKKWIWKKSSGNKEGLQKEYANTIGLPPRTQSLYLGNLPKLENVSKGVTDIIYDTKEKFLAGCLIVSFHEGKNLKTSHEKKNDDNGKKLCKALEYSFADYGDLIKGTSIWDNEYTKDLELNLQKAFGKLFRKYIKKNISAEQDTSYSSLDELRESWWNTNKKYIWIAMKHGAGMNGTTCCGDGSSGENQTNSCDDIPTIDLIPQYLRFLQEWVEHFCEQRQAKVKDVITNCKSCKNTSGERKIGGTCNGECKTKCKNKCEAYKTFIEHCKGGDGTAGSSWVKRWDQIYKRYSKHIEDAKRNRKAGTKSCGTSTAENKCVQSDIDSFFKHLIDIGLTTPSSYLSIVLDENNCGEDKAPWTTYTTTKNCDIQKDKSKSQSSDTLVVVNVPSPLGNTPHGYKYACQCKIPTTEETCDDRKEYMNQWSCGSARTMKRGYKNDNYELCKYNGVDVKPTTVRSSSTKLDGNDVMFFNLFEQWNKEIQYQIEQYMTNANISCNNEMKVLSSSSEESQNQNGSDHHDGRNNNTDQSTNCKEKCECYKLWIEKIKKQWGKQKNNYNKFRSKQIYDANKGPQNKKVVSLSHFLFFSCWEEYIQKQFNGDWSKIKNIGSDTFEFLIKKCGNNSGDGETIFNKKLKNAEKKCKENESTDTKMKSSETSCDLNATNYIRGCQSKTYDGKIFPGKGGEKQWICKDTIIHGDTNGACIPPRTQNLCVGNLWDKSYGGRSNIKNDTKESLKNKLKNAIQKETELLYEYHDKGTAIISRNPMKEGGEDGKGKQKEGGEEANNNSNGLPKGFCHAVQRSFIDYKNMILGTSVNTYEYIGKLQEDIKKIIEKGTPQQKDKIGGVGSSTENVNAWWKGIEGEMWDAVRCAITKIKKQKKNGTFNGDECGVSPPTGNDEDQFVSWFKEWGEQFCIERLRYEQNIREACTINGKNEKKCINSKSGQGDKIQGACKRKCEKYKKYISEKKQEWDKQKTKYENKYVGKSASDLLKENYPECISANFDFIFNDNIEYKTYYPYGDYSSICSCEQVKYYKYNNAEKKNNKSLCHEKGNDRTWSKKYIKKLENGRTLEGVYVPPRRQQLCLYELFPIIIKNKNDITNAKEELLETLQIVAEREAYYLWKQYNPTGKGIDDANKKACCAIRGSFYDLEDIIKGNDLVHDEYTKYIDSKLNEIFGSSNKNDIETKRARTDWWENETITNGTDRKTIRQLVWDAMQSGVRKAIDEEKEKKKPNENFPPCMGVEHIGIAKPQFIRWLEEWTNEFCEEYTKYFEDMKSNCNRRKGADDCGDNTNIECKKACANYTNWLNPKRIEWNGMSNYYNKIYRKSNKESEDGKDYSMIMEPTVIDYLNKRCNGEINGNYICCSCKNIGAYNTTSGTVNKKLQKKETECEDNKGPLDLMNEVLNKMDEKYSKLNL

SEQ ID NO: 20 - protein, 1980 aa, Artificial Sequence
  synthetic
MDSTSTIGDKIEAYLGAKSNDSKIDQSLKADPSKVQYYGSGGDGYYLKNNICKITVNHSDSGTNDPCEKKELSYGDNDQWKCQQNSSDGSENNKNIFVPPRRQRMCIKNLEKLNVDKIRDKHAFLADVLLTARNEGERIILYHPDTNSSNVCVALERSFADIADIIRGTDQLKGSNILEQNLKQMFAKIREKDKVLQDKYPNDDENYKKLREDWWNANRQKVWEVITCSARSNDLLIKRRWTTSKESEGENKLELCRKCGHYEEKVPTKLDYVPQFLRWLTEWIEDLYREEQNLIDDMERHREECTRKNVESNEGASYCNMCKEKHTKYCECVKKWKSEWENQKNKYTELYEQENETSQKNTSRYDDYVKDFFEKLKGNGYSSANSYVKDDPYSAEYVTKLSFILNSSDANTSSETPSKYYDEVCNCNESEISSVGQAQTSGPSSNKTCITHSSIKTNKKKVCKDVKLGINNNDKVLRVCVIEDTSLSGVDNCCCQDLLGILQENCSDKNQSGSSSNGSCNNKNQDECQKKLEKVFASLTNGYKCDKCKSGTSRSKKKWIWRKSSGNEEGLQKEYANTIGLPPRTQSLYLGNLPKLENVCKGVTDIIYDTKEKFLSGCLIAAFHEGKNLKTSHEKKNDDNGKKLCKALEYSFADYGDLIKGTSIWDNDFTKDLELNLQKIFGKLFRKYIKKNNTAEQDTSYSSLDELRESWWNTNKKYIWTAMKHGAGMNSTTCSGDGSVTGSGSSCDDMPTIDLIPQYLRFLQEWVEHFCKQRQEKVKDVITNCNSCKECGDTCNGECKTECKTKCKGECEKYKNFIEECNGTADGGTSGSSWSKRWDQIYKRYSKYIEDAKRNRKAGTKNCGTSSTTNAAASTTENKCVQSDIDSFFKHLIDIGLTTPSSYLSNVLDDNICGEDKAPWTTYTTYTTKNCDIQKKTPKPQSCDTLVVVNVPSPLGNTPHGYKYVCECKIPTTEETCDDRKEYMNQWIIDTSKKQKGSGSTNNDYELYTYNGVQIKQAAGTLKNSKLDENDVMFFNLFEQWNKEIQYQIEQYMTNTKISCNNEKNVLSRVSEESQNQNGSDHHDGGNNNTDQGTNCKKNCECYELWIKKITEQWETQKKNYNKFQSKQIYDGNNASHKKEIVKLSHFLFFSCWEEYIQKYFNGDWSKIKNIGSDTFEFLIKKCGNNSGDGETIFSEKLKNAQQQCKEIQNTDTKINPSVISSVLNATNYIRGCQPKRYDGFISPGKGGEKQWICKDTITHGDTNGACIPPRTQNLCVGELWYKRYGGRSNIKNDTKESLKNKLKNAIQKETELLYEYHDTGTAIISRNPMKEGGEDGKGKQKEGGEEANNNSNGLPKGFCHAVQRSFIDYKNMILGTSVNIYEYIGKLQEDIKKIIEQERTKTKDKIGGSGADKVNDWWKGIEGEMWDAVKCAITKIKKQKKNGTYTGNECGVSPPTGNDEDQSVSWFKEWGEQFCIERLRYEQNIREACTINGKNEKKCINSKSGQEDKVEGACKRKCEKYKKYISEKKQEWDKQKTKYENKYVGKSASDLLKENYPECISANFDFIFNDKADHKKYYPYGDYSSICSCEQVKYYKYNNAEKKNNKSLCHEKGNDRTWSKKYIKKLENGRSLEGVYVPPRRQQLCLYELFPIIIKNEEGMEKAKEELLETLQIVAEREAYYLWKQYNPTGKGIDDANKKACCAIRGSFYDLEDIIKGNDLVHDEYTKYIDSKLNEIFGSSNKNDIDTKRARTDWWENETIDVANGTDHKTIRQLVWDAMQSGVRKAIDEENEKKKQNKNFPPCMGVEHIGIAKPQFIRWLEEWTNEFCEEYTKYFGAINSNCNRRKGADDCGDNSNIECKRACANYTNWLNPKRIEWNGMSNYYNKIYRKSNKESEDGKDYSMIMAPTVIDYLNKRCNGEINGNYICCSCKNIGENYNPSPAQKTKGSKKKDEQCEDNKGPLDLMNEVLNKMDEKYSAH

SEQ ID NO: 21 - protein, 1965 aa, Artificial Sequence
  synthetic
MDSTSTIGDKIEEYLGAKSNDSKIDQSLKADPSKVQYYGSGGDGYYLKNNICKITVNHSDSGKYEPCDSIPPPYGDNDQWKCDENLFKASGNHKNICVPPRRQHMCIKNLENLKFDKIRDKHAFLADVLLTARNEGERIILYHPDTNSSNVCVALERSFADIADIIRGTDQWKGTNKFEPYLKQMFAKIREKDKVLQDKYQNDDENYKKLREDWWNANRQKVWEVITCGARSNDLLIKRRWRTSGKSNGENKLELCRKCGHYEKEVPTYLDYVPQFLRWLTEWIEDLYREEQNLIDDMERHREECTRKNVDSKEGTSYCNMCKEKHTKYCEFVNKWKSEWKNQENKYKDLYQQENKTSSSSKNTSRYDNYVKEFFEKLEANYKSLENYIKGDPYFAEYVTKLSFILNSSDANTSSGETANHNDEACNRNESEISSVEQAPISGPSSNKTCNTHSSIKANKKKECKDVKLGINNNDKDLKICVIEDTSLSGVDNCCCQDFLRMLQENCSDNKRGSSSNGSCDNKNQDECQTKLDEALASLTNGYKCEKCKSEQSKKNNNQWIWKKSRGTEGGLQEEYANTIALPPRTQSLCLVCLHEKEEKTQHKTISTNSELLKEWIIAAFHEGKNLKKRYHQNKNADNEKKKGENKKKLCKALKYSFADYGDLIKGTSIWDNEYTKDLELNLQQIFGKLFRKYIKKNISTEQDTLYSSLDELRESWWNTNKKYIWLAMKHGAEMNGTTCCGDGSSGENQTNSCDDIPTIDLIPQYLRFLQEWVEHFCKQRQENVNAVIENCKSCKECGGTCGSDCKTECEKKCKAYKEFIEKCEGQAAEGTSGYSWSKRWDQIYKRYSKYIEDAKRNRKAGTKNCGTSSGATSGVTTTENKCVQSDIDSFFKHLIDIGLTTPSSYLSIVLDDNICGADNAPWTTYTTYTTKNCDKEKDKSKSQSCDTAVVVNVPSPLGNTPHGYKYACQCKIPTTEESCDDRKEYMNQWIIDNTKNPKGSRSTNNDYELYTYNGVKETKLPKKLNSSKLDENDVTFFNLFEQWNKEIQYQIEQYMTNTKISCNNEKNVLSSSSEESKNQNGSDHHDGGNNNINQGTNCKEKCECYELWIKKIKEQWDKQKNNYNKFQSKQIYDARKSSQNKKEIVKLSHFLFFSCWEEYIQKYFNGDWSKIKNIGSDTFEFLIKKCGNNSGDGETIFSEKLKNAHIKCKENESTDTKINKSETSSKCNKTNYIRGCQSKRYDGKIFPGKGGEKQWICKDTITHGDTNGACIPPRTQNLCVGELWDKSYGGRSNIKNDTKELLKNKLKNAIQKETELLYEYHDKGTAIISQNDKKGQKGKNDPNGLPKGFCHAVQRSFIDYKNMILGTSVNTYEYIGKLQEDIKKIIEKGTTKQNGKTVGSGADKVNDWWKEIEKDMWGAVKSGIKTIKKQNNKCTYTGNECGVSPPTGNDEDQFVSWFKEWGEQFCIERLQYEQNIRDACTNNGKNEKKCINSKNNNEKEIQGDCKRKCEEYKKYISEKKQEWDKQKTKYENKYVGKSASDLLKENYPECISANFDFIFNDNIEYKTYYPYGDYSSICSCEQVKYYKYNNAEKKNNKSLCHEKGNDRTWSKKYIKKLENGRTLEGVYVPPRRQQLCLYELFPIIIKKEKDMEKAKELLETLQIVAEREAYYLWKQYNPTGKGIDDANKKAHKKACCAIRGSFYDLEDIIKGNDLVHDEYTKYIDSKLNEIFGSSNTNDIETKRARTDWWENETIGVANGTDSKTIRQLVWDAMQSGVIYAEEKKENFPPCMRVEHIGIAKPQFIRWLEEWTNEFCEKYTKYFEDMKSKCDPPKGADDCDDNSNIECKRACANYTNWLNPKRIEWNGMSNYYNKIYRKSNKESEDGKDYSMIMEPTVIDYLNKRCHGEINGNYICCSCKNIGENSTSGTVNKKLQKKETECEDNKGPLDLMNEVLNKMDKKYSAH

SEQ ID NO: 22 - protein, 1963 aa, Artificial Sequence
  synthetic
MDKSSIGDKIEAYLEKKSDESDIEQSLKADPSEVEYYRSGGDGDYLRKNICKITVNHSDSGKYEPCDRKELSYGDIDEWKCQQNSSDGSEKPENICVPPRRQRMCIKNLENLKFDKIRDNNAFLADVLLTARNEGERIVQNHPDTNSSNVCVALERSFADLADIIRGTDQWKGTNKFEPCLKQMFAKIRENDKVLQDKYPNDDPKYTKLREDWWNANRQKVWEVITCGARSNDLLIKLGWTSSKESEGDNKLELCRKCGHYEEKVPTKLDYVPQFLRWLTEWIEDFYREKQNLIDGMERHREECTRKNVESKEGTSYCTNCKEKCKKYCEYVNKWKSEWENQKNKYNDLYQQENKTSSSSKKKSRYDDYVKEFFKNFKGDNYKSLENYIKGDPYFAEYATKLSFILNSSDTENASETPSKYYDEACNCNESEIASVGQAQTSGPSSNKTCITHSSIKTNKKKECKDVKLGINNNDKVLRVCVIEDTSLSGVDNCCCQDLLGILQENCSDNKRGSSSNGSCDKNSEEICQKKLEKVFASLTNGYKCDKCKSGTSRSKKKWIWKKSSGNEEGLQKEYANTIGLPPRTQSLCLVCLHEKEGKTQHKTISTNSELLKEWIIAAFHEGKNLKTSHEKKNDDNGKKLCKALEYSFADYGDLIKGTSIWDNEYTKDLELNLQKIFGKLFRKYIKKNNTAEQHTSYSSLDELRESWWNTNKKYIWTAMKHGAGMNGTTCSCSGDSSNDMPTIDLIPQYLRFLQEWVEHFCKQRQEKVNAVIENCNSCKESGGTCNSDCKTECKNKCEAYKEFIEDCKGGGTGTAGSPWSKRWDQIYKRYSKHIEDAKRNRKAGTKNCGTSSTTNAAASTDENKCVQSDVDSFFKHLIDIGLTTPSSYLSNVLDDNICGADKAPWTTYTTYTTTKNCDIQKKTPKSQSCDTLVVVNVPSPLGNTPHEYKYACECKIPTTEETCDDRKEYMNQWSCGSAQTVRGRSGKDDYELYTYNGVKETKPLGTLKNSKLDGNDVMFFNLFEQWNKEIQYQIEQYMTNTKISCNNEMKILSSSSEESQNQNGSDHHDGRNNNINQGTNCKKNCECYSLWIEKIKKQWDKQKDNYNKFQRKQIYDANKGPQNKKVVSLSHFLFFSCWEEYIQKYFNGDWSKIKNIGSDTFEFLIKKCGNDSGDGETIFNKKLNNANIKCNENASKDTKINKSETSSKCSEPIYIRGCQSKRYDGFISPGKGGEKQWICKDTIIHGDTNGACIPPRTQNLCVGELWDKRYGGRSNIKNDTKESLKNKLKNAIQKETELLYEYHDTGTAIISRNPMKEGGEDGKGKQKEGGEEANNNFNGLPKGFCHAVQRSFIDYKNMILGTSVSTYEYIGKLQEDIKKIIEQGRKPKDKTVGSGADKVNDWWKEIEKDMWGAVKCGIKTIKKQKKNGTFNGDECGVSPPTGNDEDQFVSWFKEWGEQFCIERLRYEQNIRDACINKDMEQNKCINSKNNNEKEIQGDCKRKCEKYKKYISEKKQEWDKQKTKYENKYVGKSASDLLKENYPECISANFDFIFNDNIEYKTYYPYGDYSSICSCEQVKYYKYIKDKGQNNKSLCHEKGNDRTWSKKYIKKLENGRTLEGVYVPPRRQQLCLYELFPIIIKKEKDMEKAKEELLETLQIVAEREAYYLWKQYHAHNDTTYLAHKKACCAIRGSFYDLEDIIKGNDLVHDEYTKYIDSKLNEIFGSSNKNDIETKRARTDWWENETIDVANGTDRKTIRQLVWDAMQSGVRKAIDEEKEKKKPNKNFPPCMGVEHIGIAKPQFIRWLEEWTNEFCEEYTKYFGAINSNCNLRKGADDCGDNSNIECKRACANYTNWLNPKRIEWNGMSNYYNKIYRKSNKESEDGKDYSMIMEPTVIDYLNKRCNGEINGNYICCSCKNIGENSTSPVANKKAQRKETECEEEKGPLDLMNEVLNKMDEKYSAH

SEQ ID NO: 23 - protein, 1974 aa, Artificial Sequence
  synthetic
MDKSSIGDKIEEYLKEKSNDSKIDQSLKADPSEVQYYRSGGDGYYLKNNICKITVNHSDSGTNDPCDRKELSYGDNDQWKCDENLYKASENNKNIFVPPRRQRMCIKNLEKLNVEKIRDKHAFLADVLLTARNEGERIVQNHPDTNSSNVCVALERSFADLADIIRGRDGNKCETKSTNNVEELIKKFFEKNYRENKEYKRKYRNDDPKYTKLREDWWTKNRQKVWEVITCSARSNDLLIKRRWRTSGKSNGENKLELCRKCGHYEKEVPTKLDYVPQFLRWLTEWIEDLYREKQNLIDGMERHREECTSEDDKSKEVTSYCNMCKDKCKKYCEYVNKWKSEWENQKNKYTELYEQNKNKTSQKNASRYDDYVKDFFKKLNEANYKSLDDYIKDDPYSKEYVTKLSFILNSSDANTSSGETANHNDEACNPNESEISSVGQAPISDPSSNKTCITHSSIKANKKKECKHVKLGVRENDKVLRVCVIEDTSLSGVDNCCCQDLLGMLQEPRIDKNQRGSSSNGSCDKNSEEICQKKLDEALASLTNGYKCDKCKSGTSTVNKNWIWKKYSGKEGGLQEEYANTIGLPPRTQSLCLVCLHEKEGKTQHKTISTNSELLKEWIIDAFHEGKNLKTSHQNKNSGNKENLCKDLKYSFADYGDLIKGTSIWDNEYTKDLELNLQKAFGKLFRKYIKKNNTAEQHTSYSSLDELRESWWNTNKKYIWLAMKHGAGMNGTTCCGDGSVTGSSDSGSTTCSGDNGSISCDDIPTIDLIPQYLRFLQEWVEHFCKQRQEKVKPVITNCNSCKNTSSKTKLGGTCNSDCEKKCKDECEKYKKFIEEFCTAAGGTSGSPWSKRWDQIYKRYSKYIEDAKRNRKAGTKNCGPSSTTSTAENKCVQSDIDSFFKHLIDIGLTTPSSYLSIVLDENNCGEDNAPWTTYTTYTTTKNCDIQKKTPKSQSCNTAVVVNVPSPLGNTPHGYKYACQCKIPTTEESCDDRKEYMNQWSSGSAQTVRGRSTNNDYELYTYNGVKETKLPKKLNSSKLDGNDVMFFNLFEQWNKEIQYQIEQYMTNANISCNNEMNVLSSSSEESKNQNGSDHPDGRNNNINQGTNCKEKCKCYELWIKKIKEQWGKQKDNYNKFEKKTSNDARKSSQNKKVVSLSHFLFFSCWEEYIQKYFNGDWSKIKNIGSDTFDFLIKKCGNDSAHGETIFNKKLNNANIKCNENESTNNKMKSSETSCDCSEPIYIRGCQSKTYDGKIFPGKGGEKQWICKDTITHGDTNGACIPPRTQNLCVGELWDKRYGGRSNIKNDTKESLKNKLKNAIQKETELLYEYHDKGTAIISQNDKKEKANNNNSNGLPKGFCHAVQRSFIDYKNMILGTSVNIYEHIGKLQEDIKKIIEQETTKQNGKTVGGADKVNAWWKGIEGEMWGAVRCAITKINKKKKNGTFSIDECGIFPPTGNDEDQSVSWFKEWGEQFCIERLQYEQNIREACTINGKNGKKCINSKSGQEDKIQGACKRKCEKYKKYISEKKQEWDKQKTKYENKYVGKSASDLLKENYPECISANFDFIFNDNIEYKTYYPYGDYSSICSCEQVKYYEYNNAEKKNNKSLCHEKGNDRTWSKKYIKKLENGRTLEGVYVPPRRQQLCLYELFPIIIKNEEGMEKAKEELLETLQIAAEREAYYLWKQYHAHNDTTYLAHKKACCAIRGSFYDLEDIIKGNDLVHDEYTKYIDSKLNKIFGSSNKNDIETKRARTDWWENEAIGVANGTDHKTIRQLVWDAMQSGVRYAVEEKKKKKQNENFPPCMGVEHIGIAKPQFIRWLEEWTNEFCEEYTKYFGAINSKCNLRKGADDCDDNSNIECKRACANYTNWLNPKRIEWNGMSNYYNKIYRKSNKESEDGKDYSMIMEPTVIDYLNKRCHGEINGNYICCSCKNIGENSTSPVANKKAQRKDEQCEDNKGPLDLMNEVLNKMDEKYSEH

SEQ ID NO: 24 - protein, 1968 aa, Artificial Sequence
  synthetic
MDSKTTIGDKIEAYLEKKSNESDIDQSLKADPSEVEYYRSGGDGDYLRKNICKITVNHSDSGKYEPCDSIPPPYGDIDEWKCQQNSSDGSEKPENVFVPPRRQRMCIKNLENLNVERIRDNNAFLADVLLTARNEGERIVQNHPDTNSSNVCIALERSFADLADIIRGTDQWKGTNSNLEQNLKQMFKNILEKGSTIQSNYSKKDQNYTKLREDWWTKNRQKVWEVITCGARSNDLLIKRRWTTSKESEGENKLELCRKCGHYEGKVPTKLDYVPQFLRWLTEWIEDFYREKQNLIDGMERHREECTREDHKSKEGASYCSTCKDKCKKYCECVKKWKSEWENQKNKYKDLYQQENETSSSSKKKSRYDDYVKEFFKNFKGDNYKSLDDYIKGDPYSKEYTTKLSFILNPSDANTSSEKIQKNNDEACNCNESEIASVEQASISDRSSQKAYITHSSIKANKKKVCKHVKLGVRENDKVLRVCVIEDTSLSGVENCCFKDFLRIVEEPRIDKNQRGSSSNGSCNNNNEEACEKNLDEALASLTNCYKCDKCKSEQSKKNNNKWIWRKFPGNGEGLQKEYANTIGLPPRTQSLCLVCLHEKEGKTQELKNIRTNSELLKEWIIDAFHEGKNLKTSHQKKNAENKKKLCKALEYSFADYGDLIKGTSIWDNEYTKDLELNLQKIFGKLFRKYIKKNISTEQHTSYSSLDELRESWWNTNKKYIWTAMKHGAEMNSTMCNVDGSVTGSSDSGSTTCSGDNGSISCDDIPTIDLIPQYLRFLQEWVEHFCKQRQAKVNAVIKNCNSCKESGGTCNGDCKTKCKVACDAYKKFIEECRTAAEGTAGSSWVKRWYQIYMRYSKHIEDAKRNRKAGTKSCGTSTAESKCVQSDIDSFFKHLIDIGLTTPSSYLSNVLDENNCGADKAPWTTYTTYTTYTTYTTTKNCDIQKDKSKSQSCNTAVVVNVPSPLGNTPYEYKYACECKIPTTEETCDDRKEYMNQWISDNTKNPKGSGSTNNDYELYTYNGVQIKQAAGRSSSTKLDDKDVMFFNLFEQWNKEIQYQIEQYMTNTKISCIDEKEVLDSVSDEGTPKVRGGYEDGRNNNTDQGTNCKEKCECYKLWMEKIKKQWETQNQNYNKFEKKTSSYANKGPQNKKVVSLSHFLFFSCWEEYIQKYFNGDWSKIKNIGSDTFEYLIKKCGNDSGDGETIFNKKLKNAHIKCNENASKNTKINKSETSSDCSEPIYIRGCQSKTYDGFISPGKGGEKKWICKDTITHGDTNGACIPPRTQNLCVGELWDKSYGGRSNIKNDTKESLKNKLKNAIQKETELLYEYHDKGTAIISQNDKKEKANNNNSNGLPKGFCHAVQRSFIDYKNMILGTSVNIYEHIGKLQEDIKKIIEQERTKTKEKTVGSGADKVNDWWKEIEGEMWDAVRCGITKINKKNNNSIFNGNECGNSPSTGNDEDQSVSWFKEWGEQFCIERLQYEKNIREACTINGKNEKKCINSKSGQGDKIQGACKRKCEKYKKYISEKKQEWDKQKTKYENKYVGKSASDLLKENYPECISANFDFIFNDKADHKKYYPYGDYNSICSCEQVKYYEYNKDKGQSNKSLCHEKGNDRTWSKKYIKKLENGRTLEGVYVPPRRQQLCLYELFPIIIKKEKDMENVKKELLETLQIVAEREAYYLWKQYNPTGKGIDDANKKACCAIRGSFYDLEDIIKGNDLVHDEYTKYIDSKLNEIFGSSNKNDIETKRARTDWWENETITNRTDRKTIRQLVWDAMQSGVRYAVEEKNENFPPCMGVEHIGIAKPQFIRWLEEWTNEFCEEYTKYFEDMKSKCDLRKGADDCGDNTNIECKRACANYTNWLNPKRIEWNGMSNYYNKIYRKSNKESEDGKDYSMIMEPTVIDYLNKRCNGEINGNYICCSCKNIGENYNPSPAQKTKGSKKKDEQCEDNKGPLDLMNEVLNKMDPKYSKL

SEQ ID NO: 25 - protein, 1991 aa, Artificial Sequence
  synthetic
MDSTSTIANKIEEYLKEKSNESDIDQSLKADPSEVEYYRSGGDGDYLRKNICKITVNHSDSGKYDPCDRKELSYGDNDQWKCDENLSKVSEKPENICVPPRRQRMCIKNLENLNVERIRDKHAFLADVLLTARNEGERIVQNHPDTNSSNVCIALERSFADLADIIRGTDQWKGTNSNLEKNLKQMFAKIRENDKVLQDKYPNDDPKYTKLREGWWNANRQKVWEVITCSARSNDLLIKRRWTTSKESEGENKLELCRKCGHYEGKVPTYLDYVPQFLRWLTEWIEDFYREKQNLIDGMERHREECTREDDKCKEGASYCSTCKDKCKKYCECVKKWKSEWENQKNKYTELYEQNKNKTSQKNTSRYDNYVKDFFEKLEANYKSLDDYIKDDPYFAEYATKLSFILNSSDANNPSGETANHNDEVCNPNESEISSVGQAQTSGPSSNKTCITHSSIKTNKKKVCKYVKLGVRENDKDLKICVIEDTSLSGVDNCCCQDLLGILQENCSDNKRGSSSNGSCNNNNEEACEKNLEKVLASLTNGYKNQKCKSEQSKKNNNKWIWKKSSGNGEGLQKEYANTIGLPPRTQSLYLGNLRKLGNVCEDVKDINFDTKEKFLAGCLIAAFHEGKNLKTTYLEKKKGDNGKKLCKDLKYSFADYGDLIKGTSIWDNDFTKNVELNLQQIFGKLFRKYIKKNNTAEQDTSYSSLDELRESWWNTNKKYIWLAMKHGAGMNGTTCSSGSGDNGDSSITGSSDSGSTTCSGDNGSISCDDIPTIDFIPQYLRFLQEWVENFCEQRQAKVNAVINSCNSCKNTSGERKIGDTCNSDCKTECKNKCEAYKTFIDNVGDGTAGSPWVKRWDQIYKRYSKHIEDAKRNRKAGTKNCGITTGTISGESSGATSGVTTTENKCVQSDIDSFFKHLIDIGLTTPSSYLSIVLDENNCGEDKAPWTTYTTYTTYTTYTTTKNCDIQKDKSKLQQSNTAVVVNVPSPLGNTPHEYKYACQCKIPTTEETCDDRKEYMNQWIIDNTKNPKGSRSTNNDYELYTYNGVKETKPLGTLKSSKLDDKDVMFFNLFEQWNKEIQYEIEQYMTNTKISCNNEMKVLSSSSEESQNQNGSDHHDGRNNNINQGTNCKKNCECYSLWMEKIKKQWGKQKNNYNKFQRKQIYDGNNASHKKEIVKLSNFLFFSCWEEYIQKYFNGDWSKIKNIGSDTFEYLIKKCGNDSGDGETIFNKKLKNAHIKCNENESTDTKINKSETSSDCSEPIYIRGCQSKTYDGFISPGKGGEKKWICKDTITHGDTNGACIPPRTQNLCVGELWDKRYGGRSNIKNDTKESLKNKLKNAIQKETELLYEYHDKGTAIISQNDKKEKANNNNSNGLPKGFCHAVQRSFIDYKNMILGTSVNTYEYIGKLQEDIKKIIEQGRKPKEKRVGSGADKVNDWWKEIEKDMWGAVKCGIKTIKKQKKNGTFSIDECGVSPPTGNDEDQFVSWFKEWGEQFCIERLQYEKNIREACTINGKNEKKCINSKSGQEDKIQGACKRKCEKYKKYISEKKQEWDKQKTKYENKYVGKSASDLLKENYPECISANFDFIFNDKADHKKYYPYGDYNSICSCEQVKYYEYNKDKGQNNKSLCHEKGNDRTWSKKYIKKLENGRSLEGVYVPPRRQQLCLYELFPIIIKKEKDMEKAKEELLETLKIVAEREAYYLWKQYHAHNDTTYLAHKKACCAIRGSFYDLEDIIKGNDLVHDEYTKYIDSKLNEIFGSSNTNNIDTKRARTDWWENETITNGPDRKTIRQLVWDAMQSGVRYAVEEKKENFPPCMGVEHIGIAKPQFIRWLEEWTNEFCEEYTKYFEDMKSKCDPPKSADDCGDNTNIECKKACANYTNWLNPKRIEWNGMSNYYNKIYRKSNKESEDGKDYSMIMEPTVIDYLNKRCNGEINGNYICCSCKNIGAYNTTSGTVNKKLQKKETECEDNKGPLDLMNEVLNKMDEKYSAH

SEQ ID NO: 26 - protein, 1953 aa, Artificial Sequence
  synthetic
MDKSSIGDKIEAYLEKKSNESDIDQSLKADPSEVQYYGSGGDGYYLKNNICKITVNHSDSGTNDPCDRKELSYGDIDEWKCQQNSSDGSGKPENICVPPRRQRMCINNLEKLKFDKIRDKHAFLADVLLTARNEGERIVQNHPDTNSSNVCVALERSFADIADIIRGTDLWKGTNSNLEQNLKQMFAKILEKDKVLQDKYPKDQNYTKLREAWWNANRQKVWEVITCSARSNDLLIKRRWTTSGKSNGDNKLELCRKCGHYEEKVPTYLDYVPQFLRWLTEWIADLYREKQNLIDGMERHREECTREDHKSKEGTSYCNMCKDKCKKYCECVKKWKSEWENQKNKYKDLYEQNKNKTSQKNTSRYDDYVKEFFKKLEANYKSLDDYIKDDPYSKEYVTKLSFIPNSSDTENASEKIQKNNDEVCNPNESGISSVGQAQTSGTSSNKTCITHSSIKTNKKKVCKHVKLGINNNDKVLRVCVIEDDSLRGVDNCCCQDFLRMLQENCSDNKRGSSSNDSCNNKNQEACEKNLDEALASLTNGYKCDKCKSGTSTVNKNWIWRKSSGNKEGLQKEYANTIGLPPRTQSLCLVCLHEKEGKTQELKNISTNSELLKEWIIAAFHEGKNLKTTYPQNKNAENKKKLCKALKYSFADYGDLIKGTSIWDNEYTKDLELNLQKIFGKLFRKYIKKNNTAEQHTSYSSLDELRESWWNTNKKYIWTAMKHGAGMNGTTCSSGSGDNGSISCDDIPTIDLIPQYLRFLQEWVEHFCEQRQGKVKDVITNCKSCKESGDTCKTECKTKCKDECEKYKTFIEDCNGGGTGTAGSSWSKRWDQIYKRYSKYIEDAKRNRKAGTKNCGPSSTTSTAESKCVQSDIDSFFKHLIDIGLTTPSSYLSIVLDDNICGADKAPWTTYTTYTTTENCDIQKKTPKSQSCNTAVVVNVPSPLGNTPHGYKYACECKIPTTEESCDDRKEYMNQWISDTSKKQKGSGSGKDDYELYTYNGVKETKLPKKLNSTKLDDKDVMFFNLFEQWNKEIQYQIEQYMTNANISCNNEMNVLSSSSEESQNQKGSDHHVGRNNNTDQGTNCREKCECYSLWIEKIKKQWGKQKDNYNKFQRKQIYDGNNASHKKEIVKLSNFLFFSCWEEYIQKYFNGDWSKIKNIGSDTFEFLIKKCGNDSAHGETIFSEKLKNAQQQCKEIQNTDTNINKSGKSCDLNATNYIRGCQSKTYDGKIFPGKGGEKQWICKDTIIHGDTNGACIPPRTQNLCVGNLWDKSYGGRSNIKNDTKESLKNKLKNAIQKETELLYEYHDKGTAIISQNDKKGEKGKNDPNGLPKGFCHAVQRSFIDYKNMILGTSVNIYEYIGKLQEDIKKIIEQERTKTKEKRVGSGAENVNAWWKEIEKDMWGAVKCGIKTIKKQKKNGTFNGDECGVSPPTGNDEDQFVSWFKEWGEQFCIERLRYEQNIREACTINGKNGKKCINSKSGQGDKIQGDCKRKCEKYKKYISEKKQEWDKQKTKYENKYVGKSASDLLKENYPECISANFDFIFNDNIEYKTYYPYGDYNSICSCEQVKYYKYNNAEKKNNKSLCHEKGNDRTWSKKYIKKLENGRSLEGVYVPPRRQQLCLYELFPIIIKKEKDMENVKKELLETLQIVAEREAYYLWKQYNPTGKGIDDANKKACCAIRGSFYDLEDIIKGNDLVHDEYTKYIDSKLNEIFGSSNKNDIDTKRARTDWWENETFQVSNITGANKSDPKTIRQLVWDAMQSGVRYAVEEKNENFPPCMGVEHIGIAKPQFIRWLEEWTNEFCEKYTKYFEDMKSNCNRRKGADTCGDNSNIECKRACANYTNWLNPKRIEWNGMSNYYNKIYRKSNKESEDGKDYSMIMEPTVIDYLNKRCHGEINGNYICCSCKNIGEYNSTSGTVNKKLQKKETECEEEKGPLDLMNEVLNKMDEKYSAH

SEQ ID NO: 27 - protein, 1977 aa, Artificial Sequence
  synthetic
MDKSSIANKIEEYLKEKSDDSKIDQSLKADPSEVQYYGSGGDGYYLKNNICKITVNHSDSGTNDPCEKKLLPYGDNDQWKCDENLSKVSGKPENICVPPRRQRMCINNLEKLKFDKIRDKHAFLADVLLTARNEGEKIVQNHPDTNSSNVCVALERSFADLADIIRGRDGNKCETKSPNNVEELIKKFFEKNYRSNEEYRKKYPNDDENYKKLREAWWNANRQKVWEVITCSARSNDLLIKRRWRTSKESNGENKLELCRKCGHYEKEVPTKLDYVPQFLRWLTEWIEDFYREKQNLIDDMERHREECTREDDKCKEGTSYCNMCKEKHTKYCECVKKWKTEWENQENKYTELYEQNKNKTSQKNTSRYDDNVKEFFEKLKGNGYSSANSYVKNNPYSSEDGKLLKFDNTNAFKESITCNKNVCSCSGNEKLIISEGSLSSSSFGTSSSYQSSIITSKKRNECAQIKFSGNENNMNIKICSTQDNNLLVKLEDLLKGFCDTCDTGIGVEVVSENNCEEQYKKLLPSLEKCTVLNCNECNKTVFKNLKKQQEKWIWGKPKQEAAGLQEEYANTIGLPPRTQLLYLVCLHEKEGKTQELKNISTNSELLKEWIIAAFHEGKNLKPSHQNKNDDNGKKLCKDLKYSFADYGDLIKGTSIWDNDFTKDLELNLQKIFGKLFRKYIKKNISTEQDTLYSSLDELRESWWNTNKKYIWLAMKHGAGMNSTTCNGDGSVTGSSDSGSTTCSGDNGSISCDDIPTIDLIPQYLRFLQEWVEHFCKQRQEKVNAVITNCKSCKNTSGERKIGDTCGNDCEKKCKVACDAYKEFIEECRTAAEGTAGSSWVKRWDQIYKRYSKYIEDAKRNRKAGTKNCGPSSTTNAAESKCVQSDIDSFFKHLIDIGLTTPSSYLSIVLDENNCGEDNAPWTTYTTYTTTKNCDIQKDKSKSQSCNTAVVVNVPSPLGNTPHGYKYACECRTPNKQETCDDRKEYMNQWIIDNTKNPKGSGSGKDYYELCKYNGVKETKLPKKLNSSKLDDKDVMFFNLFEQWNKEIQYQIEQYMTYANISCNNEMNVLSSSSEESQNQNGSDHHDGRNNNTDQGTNCREKCKCYSLWIEKIKKQWGKQKNNYNKFEKKTSSYANKGPQNKKVVSLSHFLFFSCWEEYIQKYFNGDWSKIKNIGSDTFEFLIKKCGNDSAHGETIFSEKLNNAHIKCNENASKNTKINPSVISSDCSEPIYIRGCQSKTYDGFISPGKGGEKQWICKDTITHGDTNGACIPPRTQNLCVGNLWDKSYGGRSNIKNDTKESLKNKLKNAIQKETELLYEYHDKGTATISRNPMKEGGEDGKGKQKEGGEKANNNNSNGLPKGFCHAVQRSFIDYKNMILGTSVNIYEYIGKLQEDIKKIIEQETPQQNGKTVGSGADKVNDWWKEIEKDMWGAVKCGITKINKKQKKNGTYTGDECGVSPPTGNDEDQFVSWFKEWGEQFCIERLQYEKNIRDACTNNGQGDKIQGACKRKCEKYKKYISEKKKEWDKQKTKYENKYVGKSASDLLKENYPECISANFDFIFNDNIEYKTYYPYGDYSSICSCEQVKYYKYNKDKGQNNKSLCHEKGNDRTWSKKYIKKLENGRSLEGVYVPPGRQQLCLYELFPIIIKNEEGMEKAKKELLETLQIVAEREAYYLWKQYHAHNDTTYLAHKKACCAIRGSFYDLEDIIKGNDLVHDEYTKYIDSKLNKIFGSSNTNNIETKRARTDWWENKTIDVPNITDANKSDSKTIRQLVWDAMQSGVRKAIDEENEKKKPNENFPPCMGVEHIGIAKPQFIRWLEEWTNEFCEKYTKYFEDMKSNCDPPKSADDCGDNTNIECKKACANYTNWLNPKRIEWNGMSNYYNKIYRKSNKESEDGKDYSMIMEPTVIDYLNKRCHGEINGNYICCSCKNIGAYNTTSGTVNKKLQKKETECEDNKGPLDLMNEVLNKMDPKYSKL

SEQ ID NO: 28 - protein, 1999 aa, Artificial Sequence
  synthetic
MDSTSTIADKIEEYLEKKSDESNIEQSLKADPSEVQYYGSGGDGYYLKNNICKITVNHSDSGKYEPCDRIPPPYGDNDQWKCQQNSSDGSGNHKNICVPPRRQRMCINNLEKLNVDKIRDKHAFLADVLLTARNEGERIVQNHPDTNSSNVCVALERSFADLADIIRGRDENKCETKSTNNVEELIKNFFGKNYRSNEEYKRKYRNDDPKYTKLRESWWTKNRQKVWEVITCGARSNDLLIKRGWRTSKESEGENKLELFRKCGHYEEKVPTKLDYVPQFLRWLTEWIEDLYREKQNLIDDMERHREECTSEDDKCKEVTSYCSTCKDKCKKYCEFVKKWKSEWKNQKNKYTELYEQNKNKTSSSSKNTSRYDDYVKEFFKKLNEANYKSLDDYIKGDPYSAEYVTKLSFILNPSDANNPSGETANHNDEVCNCNESEIACVELAQTSGSSSNKTCITHSSIKANKKKVCKDVKLGINNNDKDLKICVIEDTSLSGVENCCCQDFLRMLQENCSDNKSGSSSNGSCNNNNEDECQKKLEKVFASLTNGYKCDKCKSEQSKKNNNIWIWRKSSGDEKGLQKEYANTIGLPPRTQSLYLGNLPKLENVCEDVTDINFDTKEKFLAGCLIAAFHEGKNLKKRYHQNKNDENKKKLCKALKYSFADYGDLIKGTSIWDNEYTKDLELNLQKIFGKLFRKYIKKNISTEQDTLYSSLDELRESWWNTNKKYIWLAMKHGTTCSSGSGDNGDGSVTGSSDSGSTTCCGDGSVTGSGSSCDDIPTIDLIPQYLRFLQEWVEHFCKQRQEKVNAVINSCNSCKNTSSKTKLGDTCKTECKNKCEAYKNFIEDCKGGDGTAGSSWVKRWYQIYMRYSKYIEDAKRNRKAGTKSCGTSSGATSGVTTTENKCVQSDIDSFFKHLIDIGLTTPSSYLSIVLDDNICGADKAPWTTYTTYTTKNCDKDKKKSKSQSCDTLVVVNVPSPLGNTPHGYKYVCECRTPSNKELCDDRKEYMNQWISDTSKNPKGGRSTNNDYELYTYNGVDVKPTTVRSNSTKLDDKDVMFFNLFEQWNKEIQYQIEQYMTNTKISCNNEMKVLSRVSEESKNQNSSDDHDGGNNNTDQGTNCKEKCECYKLWIEKIKEQWDKQKKNYNKFEKKTSNDARKSSQNKKVVSLSHFLFFSCWEEYIQKYFNGDWSKIKNIGSDTFEFLIKKCGNNSGDGETIFSEKLNNANIKCNENESTDTKINKSETSCDLNATNYIRGCQSKTYDGKIFPGKGGEKQWICKDTIIHGDTNGACIPPRTQNLCVGELWDKRYGGRSNIKNDTKESLKNKLKNAIQKETELLYEYHDKGTATISRNPMKEGGEDGKGKQKEGGEKANNNKNSNGLPKGFCHAVQRSFIDYKNMILGTSVNIYEYIGKLQEDIKKIIEKGTTKQNGKTVGSGADKVNDWWKEIEKDMWGAVKCGIKTIKKQNNKCTYTGDECGIFPPTGNDEDQFVSWFKEWGEQFCIERLQYEQNIRDACINNGKNEKKCINSKSGQGDKVEGACKRKCEEYKKYISEKKKEWDKQKTKYENKYVGKSASDLLKENYPECISANFDFIFNDNIEYKTYYPYGDYSSICSCEQVKYYEYIKDKGQNNKSLCHEKGNDRTWSKKYIKKLENGRTLEGVYVPPRRQQLCLYELFPIIIKKENDITNAKKELLETLQIVAEREAYYLWKQYNPTGKGIDDANKKAHKKACCAIRGSFYDLEDIIKGNDLVHDEYTKYIDSKLNKIFGSSNTNNIDTKRARTDWWENEIITNGTDSKTIRQLVWDAMQSGVRYAVEEKNENFPPCMGVEHIGIAKPQFIRWLEEWTNEFCEKYTKYFEDMKSKCDPPKSADDCGDNSNIECKRACANYTNWLNPKRIEWNGMSNYYNKIYRKSNKESEDGKDYSMIMEPTVIDYLNKRCNGEINGNYICCSCKNIGENSTSPAQKTKGSKKKDEQCEDNKGPLDLMNEVLNKMDEKYSEH

SEQ ID NO: 29 - protein, 1966 aa, Artificial Sequence
  synthetic
MDSTSTIGDKIEEYLGAKSNESNIDQSLKADPSKVQYYRSGGDGYYLKNNICKITVNHSDSGTNDPCDRKELSYGDNDQWKCQQNSSDGSENNKNIFVPPRRQRMCINNLENLKFERIRDKHAFLADVLLTARNEGEKIVQNHPDTNSSNVCVALERSFADLADIIRGTDQWKGTNSNLEQNLKQMFKKILEKDSTLKNNYSNDDENYKKLREAWWNANRQKVWEVITCGARSNDLLIKRRWTTSKESNGENKLELCRKCGHYEEKVPTKLDYVPQFLRWLTEWIEDLYREEQNLIDDMERHREECTSEDDKSNEGTSYCTNCKEKHTKYCECVKKWKTEWENQKNKYNDLYQQKKNETSSSSKKKSRYDDYVKDFFKKLKGNVYSSANSYVKNDPYSKEYVTKLSFILNPSDANTSSGETANHNDEVCNCNESGIACVGQAQISDRLSQKACNTHSSIKTNKKKECKHVKLGVRENDKVLKICVIEHTSLSGVENCCCQDFLRILQENCSDNIRGSSSNGSCNNKNQDECEKNLDEALASLTNCYKCEKCKSEQSKKNNKNWIWKKYSVKEEGLQKEYANTIGLPPRTQSLYLGNLRKLENVCKDVTDINFDTKEKFLAGCLIAAFHEGKNLKTTYLEKKNDDNGKKLCKALKYSFADYGDLIKGTSIWDNDFTKDLELNLQKAFGKLFRKYIKKNNTAEQDTSYSSLDELRESWWNTNKKYIWTAMKHGTTCSSGSGDNGSISCDDMPTIDLIPQYLRFLQEWVEHFCKQRQEKVNAVITNCKSCKESGGTCNGECKTECEKKCKTKCKDECDAYKNFIENCKGGDGTAGSPWSKRWDQIYMRYSKYIEDAKRNRKAGTKNCGTSAAENKCVQSDIDSFFKHLIDIGLTTPSSYLSIVLDENICGDDNAPWTTYTTTEKCNKETDKSKSQQCNTAVVVNVPSPLGNTPHGYKYVCECRTPSNEETCDDRKEYMNQWISDTSKNPKGSGSGKDYYELCKYNGVKETKLPKKSSSTKLDENDVMFFNLFEQWNKEIQYQIEQYMTNTKISCNNEMKVLSRVSEESKNQNSSDNHDGGNNNTDQGTNCKEKCECYELWIEKIKKQWETQKKNYNNFETKQSNDARKSSQNKKEIVKLSHFLFFSCWEEYIQKYFNGDWSKIKNIGSDTFEFLIKKCGNNSGDGETIFSEKLNNAQQQCKEIQNTDTKINKSETSSVLNATNYIRGCQSKTYDGKIFPGKGGEKQWICKDTIIHGDTNGACIPPRTQNLCVGELWDKRYGGRSNIKNDTKESLKQKIKNAIQKETELLYEYHDKGTAIISRNPMKGKKANNNKNSNGLPKGFCHAVQRSFIDYKNMILGTSVNIYEYIGKLQEDIKKIIEQETTKQKDKIGGVGSSADKVNDWWKGIEGEMWGAVKSGIKTIKKQNNKCTYTGNECGVSPPTGNDEDQSVSWFKEWGEQFCIERLQYEQNIRDACTNNGKNGKKCINSKSGQEDKIQGDCKRKCEKYKKYISEKKKEWDKQKTKYENKYVGKSASDLLKENYPECISANFDFIFNDKADHKKYYPYGDYNSICSCEQVKYYKYNNAEKKNNKSLCHEKGNDRTWSKKYIKKLENGRTLEGVYVPPRRQQLCLYELFPIIIKKEKDMEKAKEELLETLQIVAEREAYYLWKQYNPTGKGIDDANKKACCAIRGSFYDLEDIIKGNDLVHDEYTKYIDSKLNKIFGSSNTNNIDTKRARTDWWENKTIDVPKIDVANGTDSKTIRQLVWDAMQSGVRYAVEKNEKKKQNENFPPCMRVQHIGIAKPQFIRWLEEWTNEFCEKYTKYFEDMKSNCDPPKGADDCGDNSNIECKKACANYTNWLNPKRIEWNGMSNYYNKIYRKSNKESEDGKDYSMIMEPTVIDYLNKRCHGEINGNYICCSCKNIGENSTSPAQKTKGSKKKGEQCEDNKGPLDLMNEVLNKMDEKYSAH

SEQ ID NO: 30 - protein, 1992 aa, Artificial Sequence
  synthetic
MDSKTTIAEKIEAYLGAKSNDSKIDQSLKADPSEVQYYGSGGDGYYLKNNICKITVNHSDSGTNDPCDSIPPPYGDNDQWKCQQNSSDGSEKPENVFVPPRRQRMCIKNLENLNVDKIRDKHAFLADVLLTARNEGERIILYHPDTNSSNVCNALERSFADIADIIRGTDLWKGTNSNLEQNLRRMFAKIRENDKVLQDKYPKDQNYTKLREDWWNANRQKVWEVITCGARSNDLLIKRGWRTSGKSNGDNKLELCRKCGHYEEKVPTQLDYVPQFLRWLTEWIEDFYREKQNLIDDMERHREECTREYDKSKEGTSYCSTCKDKCKKYCECVKKWKSEWENQKNKYNDLYQQNKNKTSQKNTSRYDNYVKEFFKNFKGDNYKSLENYIKGDPYFAEYVTKLSFILNSSDANTSSEKIQKNNDEVCNCNESEIASVGQASISDPSSNKTCNTHSSIKANKKKVCKDVKLGVREKDKDLKICVIEDDSLRGVDNCCCQDLLGILQENCSDNKRGSSSNGSCNNKNQDECQKKLENVFASLTNGYKCDKCKSEQSKKNNNKWIWRKFPGKEGGLQKEYANTIGLPPRTQLLYLVCLHEKGKKTQELKNIRTNSELLKEWIIAAFHEGKNLKTTYPQKKNDDNGKKLCKDLKYSFADYGDLIKGTSIWDNDFTKDLELNLQQIFGKLFRKYIKKNNTAEQDTSYSSLDELRESWWNTNKKYIWTAMKHGAGMNSTMCNADGSVTGSSDSGSTTCSGDNGSISCDDIPTIDLIPQYLRFLQEWVEHFCEQRQAKVNAVITNCKSCKESGGTCNSDCKTECKNKCKVACDAYKTFIEDCKGGGTGTAGSSWVKRWYQIYMRYSKYIEDAKRNRKAGTKSCGTSSGANSGVTTAENKCVQSDIDSFFKHLIDIGLTTPSSYLSNVLDENNCGEDKAPWTTYTTYTTYTTYTTTKNCDKDKKKSKSQSCDTLVVVNVPSPLGNTPHGYKYACECKIPTTEETCDDRKEYMNQWIIDTSKKQKGSGSTNNDYELYTYNGVKETKPLGTLNSSKLDDKDVMFFNLFEQWNKEIQYQIEQYMTNTKISCNNEMKVLSSSSEESQNRNGSDHHDGRNNNINQGTNCKEKCKCYELWIKKIKEQWDKQKNNYNKFQRKQIYDANKGPQNKKVVSLSHFLFFSCWEEYIQKYFNGDWSKIKNIGSDTFEYLIKKCGNNSGDGETIFSEKLKNAEKKCKENKSTNNKMKSSGKSSDCSETNYIRGCQSKTYDGKIFPGKGGEKQWICKDTITHGDTNGACIPPRTQNLCVGELWYKSYGGRSNIKNDTKESLKNKLKNAIQKETELLYEYHDKGTAIISQNDKKEKANNNDSNGLPKGFCHAVQRSFIDYKNMILGTSVNIYEYIGKLQEDIKKIIEKGTTKQKDKIGGSGADKVNDWWKGIEGEMWDAVKCGITKINKKQKKNGTFNGDECGVSPPTGNDEDQFVSWFKEWGEQFCIERLRYEQNIREACTINGKNGKKCINSKSGQGDKVEGACKRKCEKYKKYISEKKQEWDKQKTKYENKYVGKSASDLLKENYPECISANFDFIFNDNIEYKTYYPYGDYSSICSCEQVKYYEYNNAEKKNNKSLCHEKGNDRTWSKKYIKKLENGRTLEGVYVPPRRQQLCLYELFPIIIKKEKDMEKAKKELLETLKIVAEREAYYLWKQYNPTGKGIDDANKKACCAIRGSFYDLEDIIKGNDLVHDEYTKYIDSKLNEIFGSSNKNDIDTKRARTDWWENETIDVPNITGANKSDSKTIRQLVWDAMQSGVRKAIYEEKEKKKQNENFPPCMRVEHIGIAKPQFIRWLEEWTNEFCEEYTKYFEDMKSKCDPPKRADDCGDNTNIECKKACANYTNWLNPKRIEWNGMSNYYNKIYRKSNKESEDGKDYSMIMEPTVIDYLNKRCHGEINGNYICCSCKNIGENYNPSPAQKTKGSKKKDEQCEDNKGPLDLMNEVLNKMDEKYSAH

SEQ ID NO: 31 - protein, 1599 aa, Artificial Sequence
  synthetic
MDKSSIGDKIEEYLKEKSDDSKIDELLKADPSEVEYYRSGGDGDYLKNNICKITVNHSDSGKYEPCDRIPPPYGDNDQWKCQQNLYKASENNKNVFVPPRRQRMCINNLENLNVERIRDKHAFLADVLLTARNEGERIVQNHPDTNSSNVCIALERSFADIADIIRGRDGNKCETKSTNNVEELIKKFFEKNYRENKEYKRKYPNDDPKYTKLREDWWTKNRQKVWEVITCGARSNDLLIKRGWTTSKESEGENKLELCRKCGHYEEKVPTKLDYVPQFLRWLTEWIEDLYREKQNLIDDMERHREECTSEDHKSKEGASYCNMCKDKCKKYCECVKKWKSEWENQKNKYKDLYQQENETSSSSKKKSRYDDYVKEFFKKLNEANYSSLENYIKDDPYSKEYVTKLSFIPNSSDANTSSEKIQKNNDEVCNPNESGISSVEQAQTSGPSSNKTCITHSSIKANKKKECKDVKLGVRENDKDLKICVIEDTSLSGVDNCCCQDLLGILQENCSDNKRGSSSNDSCDNKNQDECQKKLDEALESLHNGYKNQKCKSGTSTVNKKWIWKKSSGNKEGLQKEYANTIGLPPRTQSLYLGNLPKLENVSKGVTDIIYDTKEKFLAGCLIVSFHEGKNLKTSHEKKNDDNGKKLCKALEYSFADYGDLIKGTSIWDNEYTKDLELNLQKAFGKLFRKYIKKNISAEQDTSYSSLDELRESWWNTNKKYIWIAMKHGAGMNGTTCCGDGSSGENQTNSCDDIPTIDLIPQYLRFLQEWVEHFCEQRQAKVKDVITNCKSCKNTSGERKIGGTCNGECKTKCKNKCEAYKTFIEHCKGGDGTAGSSWVKRWDQIYKRYSKHIEDAKRNRKAGTKSCGTSTAENKCVQSDIDSFFKHLIDIGLTTPSSYLSIVLDENNCGEDKAPWTTYTTTKNCDIQKDKSKSQSSDTLVVVNVPSPLGNTPHGYKYACQCKIPTTEETCDDRKEYMNQWSCGSARTMKRGYKNDNYELCKYNGVDVKPTTVRSSSTKLDGNDVMFFNLFEQWNKEIQYQIEQYMTNANISCNNEMKVLSSSSEESQNQNGSDHHDGRNNNTDQSTNCKEKCECYKLWIEKIKKQWGKQKNNYNKFRSKQIYDANKGPQNKKVVSLSHFLFFSCWEEYIQKQFNGDWSKIKNIGSDTFEFLIKKCGNNSGDGETIFNKKLKNAEKKCKENESTDTKMKSSETSGSGSGAEKKNNKSLCHEKGNDRTWSKKYIKKLENGRTLEGVYVPPRRQQLCLYELFPIIIKNKNDITNAKEELLETLQIVAEREAYYLWKQYNPTGKGIDDANKKACCAIRGSFYDLEDIIKGNDLVHDEYTKYIDSKLNEIFGSSNKNDIETKRARTDWWENETITNGTDRKTIRQLVWDAMQSGVRKAIDEEKEKKKPNENFPPCMGVEHIGIAKPQFIRWLEEWTNEFCEEYTKYFEDMKSNCNRRKGADDCGDNTNIECKKACANYTNWLNPKRIEWNGMSNYYNKIYRKSNKESEDGKDYSMIMEPTVIDYLNKRCNGEINGNYICCSCKNIGAYNTTSGTVNKKLQKKETECEDNKGPLDLMNEVLNKMDEKYSKLNL

SEQ ID NO: 32 - protein, 1606 aa, Artificial Sequence
  synthetic
MDSTSTIGDKIEAYLGAKSNDSKIDQSLKADPSKVQYYGSGGDGYYLKNNICKITVNHSDSGTNDPCEKKELSYGDNDQWKCQQNSSDGSENNKNIFVPPRRQRMCIKNLEKLNVDKIRDKHAFLADVLLTARNEGERIILYHPDTNSSNVCVALERSFADIADIIRGTDQLKGSNILEQNLKQMFAKIREKDKVLQDKYPNDDENYKKLREDWWNANRQKVWEVITCSARSNDLLIKRRWTTSKESEGENKLELCRKCGHYEEKVPTKLDYVPQFLRWLTEWIEDLYREEQNLIDDMERHREECTRKNVESNEGASYCNMCKEKHTKYCECVKKWKSEWENQKNKYTELYEQENETSQKNTSRYDDYVKDFFEKLKGNGYSSANSYVKDDPYSAEYVTKLSFILNSSDANTSSETPSKYYDEVCNCNESEISSVGQAQTSGPSSNKTCITHSSIKTNKKKVCKDVKLGINNNDKVLRVCVIEDTSLSGVDNCCCQDLLGILQENCSDKNQSGSSSNGSCNNKNQDECQKKLEKVFASLTNGYKCDKCKSGTSRSKKKWIWRKSSGNEEGLQKEYANTIGLPPRTQSLYLGNLPKLENVCKGVTDIIYDTKEKFLSGCLIAAFHEGKNLKTSHEKKNDDNGKKLCKALEYSFADYGDLIKGTSIWDNDFTKDLELNLQKIFGKLFRKYIKKNNTAEQDTSYSSLDELRESWWNTNKKYIWTAMKHGAGMNSTTCSGDGSVTGSGSSCDDMPTIDLIPQYLRFLQEWVEHFCKQRQEKVKDVITNCNSCKECGDTCNGECKTECKTKCKGECEKYKNFIEECNGTADGGTSGSSWSKRWDQIYKRYSKYIEDAKRNRKAGTKNCGTSSTTNAAASTTENKCVQSDIDSFFKHLIDIGLTTPSSYLSNVLDDNICGEDKAPWTTYTTYTTKNCDIQKKTPKPQSCDTLVVVNVPSPLGNTPHGYKYVCECKIPTTEETCDDRKEYMNQWIIDTSKKQKGSGSTNNDYELYTYNGVQIKQAAGTLKNSKLDENDVMFFNLFEQWNKEIQYQIEQYMTNTKISCNNEKNVLSRVSEESQNQNGSDHHDGGNNNTDQGTNCKKNCECYELWIKKITEQWETQKKNYNKFQSKQIYDGNNASHKKEIVKLSHFLFFSCWEEYIQKYFNGDWSKIKNIGSDTFEFLIKKCGNNSGDGETIFSEKLKNAQQQCKEIQNTDTKINPSVISGSGSGAEKKNNKSLCHEKGNDRTWSKKYIKKLENGRSLEGVYVPPRRQQLCLYELFPIIIKNEEGMEKAKEELLETLQIVAEREAYYLWKQYNPTGKGIDDANKKACCAIRGSFYDLEDIIKGNDLVHDEYTKYIDSKLNEIFGSSNKNDIDTKRARTDWWENETIDVANGTDHKTIRQLVWDAMQSGVRKAIDEENEKKKQNKNFPPCMGVEHIGIAKPQFIRWLEEWTNEFCEEYTKYFGAINSNCNRRKGADDCGDNSNIECKRACANYTNWLNPKRIEWNGMSNYYNKIYRKSNKESEDGKDYSMIMAPTVIDYLNKRCNGEINGNYICCSCKNIGENYNPSPAQKTKGSKKKDEQCEDNKGPLDLMNEVLNKMDEKYSAH

SEQ ID NO: 33 - protein, 1606 aa, Artificial Sequence
  synthetic
MDSTSTIGDKIEEYLGAKSNDSKIDQSLKADPSKVQYYGSGGDGYYLKNNICKITVNHSDSGKYEPCDSIPPPYGDNDQWKCDENLFKASGNHKNICVPPRRQHMCIKNLENLKFDKIRDKHAFLADVLLTARNEGERIILYHPDTNSSNVCVALERSFADIADIIRGTDQWKGTNKFEPYLKQMFAKIREKDKVLQDKYQNDDENYKKLREDWWNANRQKVWEVITCGARSNDLLIKRRWRTSGKSNGENKLELCRKCGHYEKEVPTYLDYVPQFLRWLTEWIEDLYREEQNLIDDMERHREECTRKNVDSKEGTSYCNMCKEKHTKYCEFVNKWKSEWKNQENKYKDLYQQENKTSSSSKNTSRYDNYVKEFFEKLEANYKSLENYIKGDPYFAEYVTKLSFILNSSDANTSSGETANHNDEACNRNESEISSVEQAPISGPSSNKTCNTHSSIKANKKKECKDVKLGINNNDKDLKICVIEDTSLSGVDNCCCQDFLRMLQENCSDNKRGSSSNGSCDNKNQDECQTKLDEALASLTNGYKCEKCKSEQSKKNNNQWIWKKSRGTEGGLQEEYANTIALPPRTQSLCLVCLHEKEEKTQHKTISTNSELLKEWIIAAFHEGKNLKKRYHQNKNADNEKKKGENKKKLCKALKYSFADYGDLIKGTSIWDNEYTKDLELNLQQIFGKLFRKYIKKNISTEQDTLYSSLDELRESWWNTNKKYIWLAMKHGAEMNGTTCCGDGSSGENQTNSCDDIPTIDLIPQYLRFLQEWVEHFCKQRQENVNAVIENCKSCKECGGTCGSDCKTECEKKCKAYKEFIEKCEGQAAEGTSGYSWSKRWDQIYKRYSKYIEDAKRNRKAGTKNCGTSSGATSGVTTTENKCVQSDIDSFFKHLIDIGLTTPSSYLSIVLDDNICGADNAPWTTYTTYTTKNCDKEKDKSKSQSCDTAVVVNVPSPLGNTPHGYKYACQCKIPTTEESCDDRKEYMNQWIIDNTKNPKGSRSTNNDYELYTYNGVKETKLPKKLNSSKLDENDVTFFNLFEQWNKEIQYQIEQYMTNTKISCNNEKNVLSSSSEESKNQNGSDHHDGGNNNINQGTNCKEKCECYELWIKKIKEQWDKQKNNYNKFQSKQIYDARKSSQNKKEIVKLSHFLFFSCWEEYIQKYFNGDWSKIKNIGSDTFEFLIKKCGNNSGDGETIFSEKLKNAHIKCKENESTDTKINKSETSSKGSGSGAEKKNNKSLCHEKGNDRTWSKKYIKKLENGRTLEGVYVPPRRQQLCLYELFPIIIKKEKDMEKAKELLETLQIVAEREAYYLWKQYNPTGKGIDDANKKAHKKACCAIRGSFYDLEDIIKGNDLVHDEYTKYIDSKLNEIFGSSNTNDIETKRARTDWWENETIGVANGTDSKTIRQLVWDAMQSGVIYAEEKKENFPPCMRVEHIGIAKPQFIRWLEEWTNEFCEKYTKYFEDMKSKCDPPKGADDCDDNSNIECKRACANYTNWLNPKRIEWNGMSNYYNKIYRKSNKESEDGKDYSMIMEPTVIDYLNKRCHGEINGNYICCSCKNIGENSTSGTVNKKLQKKETECEDNKGPLDLMNEVLNKMDKKYSAH

SEQ ID NO: 34 - protein, 1592 aa, Artificial Sequence
  synthetic
MDKSSIGDKIEAYLEKKSDESDIEQSLKADPSEVEYYRSGGDGDYLRKNICKITVNHSDSGKYEPCDRKELSYGDIDEWKCQQNSSDGSEKPENICVPPRRQRMCIKNLENLKFDKIRDNNAFLADVLLTARNEGERIVQNHPDTNSSNVCVALERSFADLADIIRGTDQWKGTNKFEPCLKQMFAKIRENDKVLQDKYPNDDPKYTKLREDWWNANRQKVWEVITCGARSNDLLIKLGWTSSKESEGDNKLELCRKCGHYEEKVPTKLDYVPQFLRWLTEWIEDFYREKQNLIDGMERHREECTRKNVESKEGTSYCTNCKEKCKKYCEYVNKWKSEWENQKNKYNDLYQQENKTSSSSKKKSRYDDYVKEFFKNFKGDNYKSLENYIKGDPYFAEYATKLSFILNSSDTENASETPSKYYDEACNCNESEIASVGQAQTSGPSSNKTCITHSSIKTNKKKECKDVKLGINNNDKVLRVCVIEDTSLSGVDNCCCQDLLGILQENCSDNKRGSSSNGSCDKNSEEICQKKLEKVFASLTNGYKCDKCKSGTSRSKKKWIWKKSSGNEEGLQKEYANTIGLPPRTQSLCLVCLHEKEGKTQHKTISTNSELLKEWIIAAFHEGKNLKTSHEKKNDDNGKKLCKALEYSFADYGDLIKGTSIWDNEYTKDLELNLQKIFGKLFRKYIKKNNTAEQHTSYSSLDELRESWWNTNKKYIWTAMKHGAGMNGTTCSCSGDSSNDMPTIDLIPQYLRFLQEWVEHFCKQRQEKVNAVIENCNSCKESGGTCNSDCKTECKNKCEAYKEFIEDCKGGGTGTAGSPWSKRWDQIYKRYSKHIEDAKRNRKAGTKNCGTSSTTNAAASTDENKCVQSDVDSFFKHLIDIGLTTPSSYLSNVLDDNICGADKAPWTTYTTYTTTKNCDIQKKTPKSQSCDTLVVVNVPSPLGNTPHEYKYACECKIPTTEETCDDRKEYMNQWSCGSAQTVRGRSGKDDYELYTYNGVKETKPLGTLKNSKLDGNDVMFFNLFEQWNKEIQYQIEQYMTNTKISCNNEMKILSSSSEESQNQNGSDHHDGRNNNINQGTNCKKNCECYSLWIEKIKKQWDKQKDNYNKFQRKQIYDANKGPQNKKVVSLSHFLFFSCWEEYIQKYFNGDWSKIKNIGSDTFEFLIKKCGNDSGDGETIFNKKLNNANIKCNENASKDTKINKSETSSKGSGSGDKGQNNKSLCHEKGNDRTWSKKYIKKLENGRTLEGVYVPPRRQQLCLYELFPIIIKKEKDMEKAKEELLETLQIVAEREAYYLWKQYHAHNDTTYLAHKKACCAIRGSFYDLEDIIKGNDLVHDEYTKYIDSKLNEIFGSSNKNDIETKRARTDWWENETIDVANGTDRKTIRQLVWDAMQSGVRKAIDEEKEKKKPNKNFPPCMGVEHIGIAKPQFIRWLEEWTNEFCEEYTKYFGAINSNCNLRKGADDCGDNSNIECKRACANYTNWLNPKRIEWNGMSNYYNKIYRKSNKESEDGKDYSMIMEPTVIDYLNKRCNGEINGNYICCSCKNIGENSTSPVANKKAQRKETECEEEKGPLDLMNEVLNKMDEKYSAH

SEQ ID NO: 35 - protein, 1614 aa, Artificial Sequence
  synthetic
MDKSSIGDKIEEYLKEKSNDSKIDQSLKADPSEVQYYRSGGDGYYLKNNICKITVNHSDSGTNDPCDRKELSYGDNDQWKCDENLYKASENNKNIFVPPRRQRMCIKNLEKLNVEKIRDKHAFLADVLLTARNEGERIVQNHPDTNSSNVCVALERSFADLADIIRGRDGNKCETKSTNNVEELIKKFFEKNYRENKEYKRKYRNDDPKYTKLREDWWTKNRQKVWEVITCSARSNDLLIKRRWRTSGKSNGENKLELCRKCGHYEKEVPTKLDYVPQFLRWLTEWIEDLYREKQNLIDGMERHREECTSEDDKSKEVTSYCNMCKDKCKKYCEYVNKWKSEWENQKNKYTELYEQNKNKTSQKNASRYDDYVKDFFKKLNEANYKSLDDYIKDDPYSKEYVTKLSFILNSSDANTSSGETANHNDEACNPNESEISSVGQAPISDPSSNKTCITHSSIKANKKKECKHVKLGVRENDKVLRVCVIEDTSLSGVDNCCCQDLLGMLQEPRIDKNQRGSSSNGSCDKNSEEICQKKLDEALASLTNGYKCDKCKSGTSTVNKNWIWKKYSGKEGGLQEEYANTIGLPPRTQSLCLVCLHEKEGKTQHKTISTNSELLKEWIIDAFHEGKNLKTSHQNKNSGNKENLCKDLKYSFADYGDLIKGTSIWDNEYTKDLELNLQKAFGKLFRKYIKKNNTAEQHTSYSSLDELRESWWNTNKKYIWLAMKHGAGMNGTTCCGDGSVTGSSDSGSTTCSGDNGSISCDDIPTIDLIPQYLRFLQEWVEHFCKQRQEKVKPVITNCNSCKNTSSKTKLGGTCNSDCEKKCKDECEKYKKFIEEFCTAAGGTSGSPWSKRWDQIYKRYSKYIEDAKRNRKAGTKNCGPSSTTSTAENKCVQSDIDSFFKHLIDIGLTTPSSYLSIVLDENNCGEDNAPWTTYTTYTTTKNCDIQKKTPKSQSCNTAVVVNVPSPLGNTPHGYKYACQCKIPTTEESCDDRKEYMNQWSSGSAQTVRGRSTNNDYELYTYNGVKETKLPKKLNSSKLDGNDVMFFNLFEQWNKEIQYQIEQYMTNANISCNNEMNVLSSSSEESKNQNGSDHPDGRNNNINQGTNCKEKCKCYELWIKKIKEQWGKQKDNYNKFEKKTSNDARKSSQNKKVVSLSHFLFFSCWEEYIQKYFNGDWSKIKNIGSDTFDFLIKKCGNDSAHGETIFNKKLNNANIKCNENESTNNKMKSSETSGSGSGAEKKNNKSLCHEKGNDRTWSKKYIKKLENGRTLEGVYVPPRRQQLCLYELFPIIIKNEEGMEKAKEELLETLQIAAEREAYYLWKQYHAHNDTTYLAHKKACCAIRGSFYDLEDIIKGNDLVHDEYTKYIDSKLNKIFGSSNKNDIETKRARTDWWENEAIGVANGTDHKTIRQLVWDAMQSGVRYAVEEKKKKKQNENFPPCMGVEHIGIAKPQFIRWLEEWTNEFCEEYTKYFGAINSKCNLRKGADDCDDNSNIECKRACANYTNWLNPKRIEWNGMSNYYNKIYRKSNKESEDGKDYSMIMEPTVIDYLNKRCHGEINGNYICCSCKNIGENSTSPVANKKAQRKDEQCEDNKGPLDLMNEVLNKMDEKYSEH

SEQ ID NO: 36 - protein, 1609 aa, Artificial Sequence
  synthetic
MDSKTTIGDKIEAYLEKKSNESDIDQSLKADPSEVEYYRSGGDGDYLRKNICKITVNHSDSGKYEPCDSIPPPYGDIDEWKCQQNSSDGSEKPENVFVPPRRQRMCIKNLENLNVERIRDNNAFLADVLLTARNEGERIVQNHPDTNSSNVCIALERSFADLADIIRGTDQWKGTNSNLEQNLKQMFKNILEKGSTIQSNYSKKDQNYTKLREDWWTKNRQKVWEVITCGARSNDLLIKRRWTTSKESEGENKLELCRKCGHYEGKVPTKLDYVPQFLRWLTEWIEDFYREKQNLIDGMERHREECTREDHKSKEGASYCSTCKDKCKKYCECVKKWKSEWENQKNKYKDLYQQENETSSSSKKKSRYDDYVKEFFKNFKGDNYKSLDDYIKGDPYSKEYTTKLSFILNPSDANTSSEKIQKNNDEACNCNESEIASVEQASISDRSSQKAYITHSSIKANKKKVCKHVKLGVRENDKVLRVCVIEDTSLSGVENCCFKDFLRIVEEPRIDKNQRGSSSNGSCNNNNEEACEKNLDEALASLTNCYKCDKCKSEQSKKNNNKWIWRKFPGNGEGLQKEYANTIGLPPRTQSLCLVCLHEKEGKTQELKNIRTNSELLKEWIIDAFHEGKNLKTSHQKKNAENKKKLCKALEYSFADYGDLIKGTSIWDNEYTKDLELNLQKIFGKLFRKYIKKNISTEQHTSYSSLDELRESWWNTNKKYIWTAMKHGAEMNSTMCNVDGSVTGSSDSGSTTCSGDNGSISCDDIPTIDLIPQYLRFLQEWVEHFCKQRQAKVNAVIKNCNSCKESGGTCNGDCKTKCKVACDAYKKFIEECRTAAEGTAGSSWVKRWYQIYMRYSKHIEDAKRNRKAGTKSCGTSTAESKCVQSDIDSFFKHLIDIGLTTPSSYLSNVLDENNCGADKAPWTTYTTYTTYTTYTTTKNCDIQKDKSKSQSCNTAVVVNVPSPLGNTPYEYKYACECKIPTTEETCDDRKEYMNQWISDNTKNPKGSGSTNNDYELYTYNGVQIKQAAGRSSSTKLDDKDVMFFNLFEQWNKEIQYQIEQYMTNTKISCIDEKEVLDSVSDEGTPKVRGGYEDGRNNNTDQGTNCKEKCECYKLWMEKIKKQWETQNQNYNKFEKKTSSYANKGPQNKKVVSLSHFLFFSCWEEYIQKYFNGDWSKIKNIGSDTFEYLIKKCGNDSGDGETIFNKKLKNAHIKCNENASKNTKINKSETSSDGSGSGDKGQSNKSLCHEKGNDRTWSKKYIKKLENGRTLEGVYVPPRRQQLCLYELFPIIIKKEKDMENVKKELLETLQIVAEREAYYLWKQYNPTGKGIDDANKKACCAIRGSFYDLEDIIKGNDLVHDEYTKYIDSKLNEIFGSSNKNDIETKRARTDWWENETITNRTDRKTIRQLVWDAMQSGVRYAVEEKNENFPPCMGVEHIGIAKPQFIRWLEEWTNEFCEEYTKYFEDMKSKCDLRKGADDCGDNTNIECKRACANYTNWLNPKRIEWNGMSNYYNKIYRKSNKESEDGKDYSMIMEPTVIDYLNKRCNGEINGNYICCSCKNIGENYNPSPAQKTKGSKKKDEQCEDNKGPLDLMNEVLNKMDPKYSKL

SEQ ID NO: 37 - protein, 1633 aa, Artificial Sequence
  synthetic
MDSTSTIANKIEEYLKEKSNESDIDQSLKADPSEVEYYRSGGDGDYLRKNICKITVNHSDSGKYDPCDRKELSYGDNDQWKCDENLSKVSEKPENICVPPRRQRMCIKNLENLNVERIRDKHAFLADVLLTARNEGERIVQNHPDTNSSNVCIALERSFADLADIIRGTDQWKGTNSNLEKNLKQMFAKIRENDKVLQDKYPNDDPKYTKLREGWWNANRQKVWEVITCSARSNDLLIKRRWTTSKESEGENKLELCRKCGHYEGKVPTYLDYVPQFLRWLTEWIEDFYREKQNLIDGMERHREECTREDDKCKEGASYCSTCKDKCKKYCECVKKWKSEWENQKNKYTELYEQNKNKTSQKNTSRYDNYVKDFFEKLEANYKSLDDYIKDDPYFAEYATKLSFILNSSDANNPSGETANHNDEVCNPNESEISSVGQAQTSGPSSNKTCITHSSIKTNKKKVCKYVKLGVRENDKDLKICVIEDTSLSGVDNCCCQDLLGILQENCSDNKRGSSSNGSCNNNNEEACEKNLEKVLASLTNGYKNQKCKSEQSKKNNNKWIWKKSSGNGEGLQKEYANTIGLPPRTQSLYLGNLRKLGNVCEDVKDINFDTKEKFLAGCLIAAFHEGKNLKTTYLEKKKGDNGKKLCKDLKYSFADYGDLIKGTSIWDNDFTKNVELNLQQIFGKLFRKYIKKNNTAEQDTSYSSLDELRESWWNTNKKYIWLAMKHGAGMNGTTCSSGSGDNGDSSITGSSDSGSTTCSGDNGSISCDDIPTIDFIPQYLRFLQEWVENFCEQRQAKVNAVINSCNSCKNTSGERKIGDTCNSDCKTECKNKCEAYKTFIDNVGDGTAGSPWVKRWDQIYKRYSKHIEDAKRNRKAGTKNCGITTGTISGESSGATSGVTTTENKCVQSDIDSFFKHLIDIGLTTPSSYLSIVLDENNCGEDKAPWTTYTTYTTYTTYTTTKNCDIQKDKSKLQQSNTAVVVNVPSPLGNTPHEYKYACQCKIPTTEETCDDRKEYMNQWIIDNTKNPKGSRSTNNDYELYTYNGVKETKPLGTLKSSKLDDKDVMFFNLFEQWNKEIQYEIEQYMTNTKISCNNEMKVLSSSSEESQNQNGSDHHDGRNNNINQGTNCKKNCECYSLWMEKIKKQWGKQKNNYNKFQRKQIYDGNNASHKKEIVKLSNFLFFSCWEEYIQKYFNGDWSKIKNIGSDTFEYLIKKCGNDSGDGETIFNKKLKNAHIKCNENESTDTKINKSETSSDGSGSGDKGQNNKSLCHEKGNDRTWSKKYIKKLENGRSLEGVYVPPRRQQLCLYELFPIIIKKEKDMEKAKEELLETLKIVAEREAYYLWKQYHAHNDTTYLAHKKACCAIRGSFYDLEDIIKGNDLVHDEYTKYIDSKLNEIFGSSNTNNIDTKRARTDWWENETITNGPDRKTIRQLVWDAMQSGVRYAVEEKKENFPPCMGVEHIGIAKPQFIRWLEEWTNEFCEEYTKYFEDMKSKCDPPKSADDCGDNTNIECKKACANYTNWLNPKRIEWNGMSNYYNKIYRKSNKESEDGKDYSMIMEPTVIDYLNKRCNGEINGNYICCSCKNIGAYNTTSGTVNKKLQKKETECEDNKGPLDLMNEVLNKMDEKYSAH

SEQ ID NO: 38 - protein, 1592 aa, Artificial Sequence
  synthetic
MDKSSIGDKIEAYLEKKSNESDIDQSLKADPSEVQYYGSGGDGYYLKNNICKITVNHSDSGTNDPCDRKELSYGDIDEWKCQQNSSDGSGKPENICVPPRRQRMCINNLEKLKFDKIRDKHAFLADVLLTARNEGERIVQNHPDTNSSNVCVALERSFADIADIIRGTDLWKGTNSNLEQNLKQMFAKILEKDKVLQDKYPKDQNYTKLREAWWNANRQKVWEVITCSARSNDLLIKRRWTTSGKSNGDNKLELCRKCGHYEEKVPTYLDYVPQFLRWLTEWIADLYREKQNLIDGMERHREECTREDHKSKEGTSYCNMCKDKCKKYCECVKKWKSEWENQKNKYKDLYEQNKNKTSQKNTSRYDDYVKEFFKKLEANYKSLDDYIKDDPYSKEYVTKLSFIPNSSDTENASEKIQKNNDEVCNPNESGISSVGQAQTSGTSSNKTCITHSSIKTNKKKVCKHVKLGINNNDKVLRVCVIEDDSLRGVDNCCCQDFLRMLQENCSDNKRGSSSNDSCNNKNQEACEKNLDEALASLTNGYKCDKCKSGTSTVNKNWIWRKSSGNKEGLQKEYANTIGLPPRTQSLCLVCLHEKEGKTQELKNISTNSELLKEWIIAAFHEGKNLKTTYPQNKNAENKKKLCKALKYSFADYGDLIKGTSIWDNEYTKDLELNLQKIFGKLFRKYIKKNNTAEQHTSYSSLDELRESWWNTNKKYIWTAMKHGAGMNGTTCSSGSGDNGSISCDDIPTIDLIPQYLRFLQEWVEHFCEQRQGKVKDVITNCKSCKESGDTCKTECKTKCKDECEKYKTFIEDCNGGGTGTAGSSWSKRWDQIYKRYSKYIEDAKRNRKAGTKNCGPSSTTSTAESKCVQSDIDSFFKHLIDIGLTTPSSYLSIVLDDNICGADKAPWTTYTTYTTTENCDIQKKTPKSQSCNTAVVVNVPSPLGNTPHGYKYACECKIPTTEESCDDRKEYMNQWISDTSKKQKGSGSGKDDYELYTYNGVKETKLPKKLNSTKLDDKDVMFFNLFEQWNKEIQYQIEQYMTNANISCNNEMNVLSSSSEESQNQKGSDHHVGRNNNTDQGTNCREKCECYSLWIEKIKKQWGKQKDNYNKFQRKQIYDGNNASHKKEIVKLSNFLFFSCWEEYIQKYFNGDWSKIKNIGSDTFEFLIKKCGNDSAHGETIFSEKLKNAQQQCKEIQNTDTNINKSGKSGSGSGAEKKNNKSLCHEKGNDRTWSKKYIKKLENGRSLEGVYVPPRRQQLCLYELFPIIIKKEKDMENVKKELLETLQIVAEREAYYLWKQYNPTGKGIDDANKKACCAIRGSFYDLEDIIKGNDLVHDEYTKYIDSKLNEIFGSSNKNDIDTKRARTDWWENETFQVSNITGANKSDPKTIRQLVWDAMQSGVRYAVEEKNENFPPCMGVEHIGIAKPQFIRWLEEWTNEFCEKYTKYFEDMKSNCNRRKGADTCGDNSNIECKRACANYTNWLNPKRIEWNGMSNYYNKIYRKSNKESEDGKDYSMIMEPTVIDYLNKRCHGEINGNYICCSCKNIGEYNSTSGTVNKKLQKKETECEEEKGPLDLMNEVLNKMDEKYSAH

SEQ ID NO: 39 - protein, 1615 aa, Artificial Sequence
  synthetic
MDKSSIANKIEEYLKEKSDDSKIDQSLKADPSEVQYYGSGGDGYYLKNNICKITVNHSDSGTNDPCEKKLLPYGDNDQWKCDENLSKVSGKPENICVPPRRQRMCINNLEKLKFDKIRDKHAFLADVLLTARNEGEKIVQNHPDTNSSNVCVALERSFADLADIIRGRDGNKCETKSPNNVEELIKKFFEKNYRSNEEYRKKYPNDDENYKKLREAWWNANRQKVWEVITCSARSNDLLIKRRWRTSKESNGENKLELCRKCGHYEKEVPTKLDYVPQFLRWLTEWIEDFYREKQNLIDDMERHREECTREDDKCKEGTSYCNMCKEKHTKYCECVKKWKTEWENQENKYTELYEQNKNKTSQKNTSRYDDNVKEFFEKLKGNGYSSANSYVKNNPYSSEDGKLLKFDNTNAFKESITCNKNVCSCSGNEKLIISEGSLSSSSFGTSSSYQSSIITSKKRNECAQIKFSGNENNMNIKICSTQDNNLLVKLEDLLKGFCDTCDTGIGVEVVSENNCEEQYKKLLPSLEKCTVLNCNECNKTVFKNLKKQQEKWIWGKPKQEAAGLQEEYANTIGLPPRTQLLYLVCLHEKEGKTQELKNISTNSELLKEWIIAAFHEGKNLKPSHQNKNDDNGKKLCKDLKYSFADYGDLIKGTSIWDNDFTKDLELNLQKIFGKLFRKYIKKNISTEQDTLYSSLDELRESWWNTNKKYIWLAMKHGAGMNSTTCNGDGSVTGSSDSGSTTCSGDNGSISCDDIPTIDLIPQYLRFLQEWVEHFCKQRQEKVNAVITNCKSCKNTSGERKIGDTCGNDCEKKCKVACDAYKEFIEECRTAAEGTAGSSWVKRWDQIYKRYSKYIEDAKRNRKAGTKNCGPSSTTNAAESKCVQSDIDSFFKHLIDIGLTTPSSYLSIVLDENNCGEDNAPWTTYTTYTTTKNCDIQKDKSKSQSCNTAVVVNVPSPLGNTPHGYKYACECRTPNKQETCDDRKEYMNQWIIDNTKNPKGSGSGKDYYELCKYNGVKETKLPKKLNSSKLDDKDVMFFNLFEQWNKEIQYQIEQYMTYANISCNNEMNVLSSSSEESQNQNGSDHHDGRNNNTDQGTNCREKCKCYSLWIEKIKKQWGKQKNNYNKFEKKTSSYANKGPQNKKVVSLSHFLFFSCWEEYIQKYFNGDWSKIKNIGSDTFEFLIKKCGNDSAHGETIFSEKLNNAHIKCNENASKNTKINPSVISSDGSGSGDKGQNNKSLCHEKGNDRTWSKKYIKKLENGRSLEGVYVPPGRQQLCLYELFPIIIKNEEGMEKAKKELLETLQIVAEREAYYLWKQYHAHNDTTYLAHKKACCAIRGSFYDLEDIIKGNDLVHDEYTKYIDSKLNKIFGSSNTNNIETKRARTDWWENKTIDVPNITDANKSDSKTIRQLVWDAMQSGVRKAIDEENEKKKPNENFPPCMGVEHIGIAKPQFIRWLEEWTNEFCEKYTKYFEDMKSNCDPPKSADDCGDNTNIECKKACANYTNWLNPKRIEWNGMSNYYNKIYRKSNKESEDGKDYSMIMEPTVIDYLNKRCHGEINGNYICCSCKNIGAYNTTSGTVNKKLQKKETECEDNKGPLDLMNEVLNKMDPKYSKL

SEQ ID NO: 40 - protein, 1995 aa, Artificial Sequence
  synthetic
MDKSSIANKIEEYLKEKSDDSKIDQSLKADPSEVQYYGSGGDGYYLKNNICKITVNHSDSGTNDPCEKKLLPYGDNDQWKCDENLSKVSGKPENICVPPRRQRMCINNLEKLKFDKIRDKHAFLADVLLTARNEGEKIVQNHPDTNSSNVCVALERSFADLADIIRGRDGNKCETKSPNNVEELIKKFFEKNYRSNEEYRKKYPNDDENYKKLREAWWNANRQKVWEVITCSARSNDLLIKRRWRTSKESNGENKLELCRKCGHYEKEVPTKLDYVPQFLRWLTEWIEDFYREKQNLIDDMERHREECTREDDKCKEGTSYCNMCKEKHTKYCECVKKWKTEWENQENKYTELYEQNKNKTSQKNTSRYDDNVKEFFEKLKGNGYSSANSYVKNNPYSSEDGKLLKFDNTNAFKESITCNKNVCSCSGNEKLIISEGSLSSSSFGTSSSYQSSIITSKKRNECAQIKFSGNENNMNIKICSTQDNNLLVKLEDLLKGFCDTCDTGIGVEVVSENNCEEQYKKLLPSLEKCTVLNCNECNKTVFKNLKKQQEKWIWGKPKQEAAGLQEEYANTIGLPPRTQLLYLVCLHEKEGKTQELKNISTNSELLKEWIIAAFHEGKNLKPSHQNKNDDNGKKLCKDLKYSFADYGDLIKGTSIWDNDFTKDLELNLQKIFGKLFRKYIKKNISTEQDTLYSSLDELRESWWNTNKKYIWLAMKHGAGMNSTTCNGDGSVTGSSDSGSTTCSGDNGSISCDDIPTIDLIPQYLRFLQEWVEHFCKQRQEKVNAVITNCKSCKNTSGERKIGDTCGNDCEKKCKVACDAYKEFIEECRTAAEGTAGSSWVKRWDQIYKRYSKYIEDAKRNRKAGTKNCGPSSTTNAAESKCVQSDIDSFFKHLIDIGLTTPSSYLSIVLDENNCGEDNAPWTTYTTYTTTKNCDIQKDKSKSQSCNTAVVVNVPSPLGNTPHGYKYACECRTPNKQETCDDRKEYMNQWIIDNTKNPKGSGSGKDYYELCKYNGVKETKLPKKLNSSKLDDKDVMFFNLFEQWNKEIQYQIEQYMTYANISCNNEMNVLSSSSEESQNQNGSDHHDGRNNNTDQGTNCREKCKCYSLWIEKIKKQWGKQKNNYNKFEKKTSSYANKGPQNKKVVSLSHFLFFSCWEEYIQKYFNGDWSKIKNIGSDTFEFLIKKCGNDSAHGETIFSEKLNNAHIKCNENASKNTKINPSVISSDGSGSGDKGQNNKSLCHEKGNDRTWSKKYIKKLENGRSLEGVYVPPGRQQLCLYELFPIIIKNEEGMEKAKKELLETLQIVAEREAYYLWKQYHAHNDTTYLAHKKACCAIRGSFYDLEDIIKGNDLVHDEYTKYIDSKLNKIFGSSNTNNIETKRARTDWWENKTIDVPNITDANKSDSKTIRQLVWDAMQSGVRKAIDEENEKKKPNENFPPCMGVEHIGIAKPQFIRWLEEWTNEFCEKYTKYFEDMKSNCDPPKSADDCGDNTNIECKKACANYTNWLNPKRIEWNGMSNYYNKIYRKSNKESEDGKDYSMIMEPTVIDYLNKRCHGEINGNYICCSCKNIGAYNTTSGTVNKKLQKKETECEDNKGPLDLMNEVLNKMDPKYSKLGSGSGDKGQNNKSLCHEKGNDRTWSKKYIKKLENGRTLEGVYVPPRRQQLCLYELFPIIIKKENDITNAKKELLETLQIVAEREAYYLWKQYNPTGKGIDDANKKAHKKACCAIRGSFYDLEDIIKGNDLVHDEYTKYIDSKLNKIFGSSNTNNIDTKRARTDWWENEIITNGTDSKTIRQLVWDAMQSGVRYAVEEKNENFPPCMGVEHIGIAKPQFIRWLEEWTNEFCEKYTKYFEDMKSKCDPPKSADDCGDNSNIECKRACANYTNWLNPKRIEWNGMSNYYNKIYRKSNKESEDGKDYSMIMEPTVIDYLNKRCNGEINGNYICCSCKNIGENSTSPAQKTKGSKKKDEQCEDNKGPLDLMNEVLNKMDEKYSEH

SEQ ID NO: 41 - protein, 1601 aa, Artificial Sequence
  synthetic
MDSTSTIGDKIEEYLGAKSNESNIDQSLKADPSKVQYYRSGGDGYYLKNNICKITVNHSDSGTNDPCDRKELSYGDNDQWKCQQNSSDGSENNKNIFVPPRRQRMCINNLENLKFERIRDKHAFLADVLLTARNEGEKIVQNHPDTNSSNVCVALERSFADLADIIRGTDQWKGTNSNLEQNLKQMFKKILEKDSTLKNNYSNDDENYKKLREAWWNANRQKVWEVITCGARSNDLLIKRRWTTSKESNGENKLELCRKCGHYEEKVPTKLDYVPQFLRWLTEWIEDLYREEQNLIDDMERHREECTSEDDKSNEGTSYCTNCKEKHTKYCECVKKWKTEWENQKNKYNDLYQQKKNETSSSSKKKSRYDDYVKDFFKKLKGNVYSSANSYVKNDPYSKEYVTKLSFILNPSDANTSSGETANHNDEVCNCNESGIACVGQAQISDRLSQKACNTHSSIKTNKKKECKHVKLGVRENDKVLKICVIEHTSLSGVENCCCQDFLRILQENCSDNIRGSSSNGSCNNKNQDECEKNLDEALASLTNCYKCEKCKSEQSKKNNKNWIWKKYSVKEEGLQKEYANTIGLPPRTQSLYLGNLRKLENVCKDVTDINFDTKEKFLAGCLIAAFHEGKNLKTTYLEKKNDDNGKKLCKALKYSFADYGDLIKGTSIWDNDFTKDLELNLQKAFGKLFRKYIKKNNTAEQDTSYSSLDELRESWWNTNKKYIWTAMKHGTTCSSGSGDNGSISCDDMPTIDLIPQYLRFLQEWVEHFCKQRQEKVNAVITNCKSCKESGGTCNGECKTECEKKCKTKCKDECDAYKNFIENCKGGDGTAGSPWSKRWDQIYMRYSKYIEDAKRNRKAGTKNCGTSAAENKCVQSDIDSFFKHLIDIGLTTPSSYLSIVLDENICGDDNAPWTTYTTTEKCNKETDKSKSQQCNTAVVVNVPSPLGNTPHGYKYVCECRTPSNEETCDDRKEYMNQWISDTSKNPKGSGSGKDYYELCKYNGVKETKLPKKSSSTKLDENDVMFFNLFEQWNKEIQYQIEQYMTNTKISCNNEMKVLSRVSEESKNQNSSDNHDGGNNNTDQGTNCKEKCECYELWIEKIKKQWETQKKNYNNFETKQSNDARKSSQNKKEIVKLSHFLFFSCWEEYIQKYFNGDWSKIKNIGSDTFEFLIKKCGNNSGDGETIFSEKLNNAQQQCKEIQNTDTKINKSETSGSGSGAEKKNNKSLCHEKGNDRTWSKKYIKKLENGRTLEGVYVPPRRQQLCLYELFPIIIKKEKDMEKAKEELLETLQIVAEREAYYLWKQYNPTGKGIDDANKKACCAIRGSFYDLEDIIKGNDLVHDEYTKYIDSKLNKIFGSSNTNNIDTKRARTDWWENKTIDVPKIDVANGTDSKTIRQLVWDAMQSGVRYAVEKNEKKKQNENFPPCMRVQHIGIAKPQFIRWLEEWTNEFCEKYTKYFEDMKSNCDPPKGADDCGDNSNIECKKACANYTNWLNPKRIEWNGMSNYYNKIYRKSNKESEDGKDYSMIMEPTVIDYLNKRCHGEINGNYICCSCKNIGENSTSPAQKTKGSKKKGEQCEDNKGPLDLMNEVLNKMDEKYSAH

SEQ ID NO: 42 - protein, 1632 aa, Artificial Sequence
  synthetic
MDSKTTIAEKIEAYLGAKSNDSKIDQSLKADPSEVQYYGSGGDGYYLKNNICKITVNHSDSGTNDPCDSIPPPYGDNDQWKCQQNSSDGSEKPENVFVPPRRQRMCIKNLENLNVDKIRDKHAFLADVLLTARNEGERIILYHPDTNSSNVCNALERSFADIADIIRGTDLWKGTNSNLEQNLRRMFAKIRENDKVLQDKYPKDQNYTKLREDWWNANRQKVWEVITCGARSNDLLIKRGWRTSGKSNGDNKLELCRKCGHYEEKVPTQLDYVPQFLRWLTEWIEDFYREKQNLIDDMERHREECTREYDKSKEGTSYCSTCKDKCKKYCECVKKWKSEWENQKNKYNDLYQQNKNKTSQKNTSRYDNYVKEFFKNFKGDNYKSLENYIKGDPYFAEYVTKLSFILNSSDANTSSEKIQKNNDEVCNCNESEIASVGQASISDPSSNKTCNTHSSIKANKKKVCKDVKLGVREKDKDLKICVIEDDSLRGVDNCCCQDLLGILQENCSDNKRGSSSNGSCNNKNQDECQKKLENVFASLTNGYKCDKCKSEQSKKNNNKWIWRKFPGKEGGLQKEYANTIGLPPRTQLLYLVCLHEKGKKTQELKNIRTNSELLKEWIIAAFHEGKNLKTTYPQKKNDDNGKKLCKDLKYSFADYGDLIKGTSIWDNDFTKDLELNLQQIFGKLFRKYIKKNNTAEQDTSYSSLDELRESWWNTNKKYIWTAMKHGAGMNSTMCNADGSVTGSSDSGSTTCSGDNGSISCDDIPTIDLIPQYLRFLQEWVEHFCEQRQAKVNAVITNCKSCKESGGTCNSDCKTECKNKCKVACDAYKTFIEDCKGGGTGTAGSSWVKRWYQIYMRYSKYIEDAKRNRKAGTKSCGTSSGANSGVTTAENKCVQSDIDSFFKHLIDIGLTTPSSYLSNVLDENNCGEDKAPWTTYTTYTTYTTYTTTKNCDKDKKKSKSQSCDTLVVVNVPSPLGNTPHGYKYACECKIPTTEETCDDRKEYMNQWIIDTSKKQKGSGSTNNDYELYTYNGVKETKPLGTLNSSKLDDKDVMFFNLFEQWNKEIQYQIEQYMTNTKISCNNEMKVLSSSSEESQNRNGSDHHDGRNNNINQGTNCKEKCKCYELWIKKIKEQWDKQKNNYNKFQRKQIYDANKGPQNKKVVSLSHFLFFSCWEEYIQKYFNGDWSKIKNIGSDTFEYLIKKCGNNSGDGETIFSEKLKNAEKKCKENKSTNNKMKSSGKSSDGSGSGAEKKNNKSLCHEKGNDRTWSKKYIKKLENGRTLEGVYVPPRRQQLCLYELFPIIIKKEKDMEKAKKELLETLKIVAEREAYYLWKQYNPTGKGIDDANKKACCAIRGSFYDLEDIIKGNDLVHDEYTKYIDSKLNEIFGSSNKNDIDTKRARTDWWENETIDVPNITGANKSDSKTIRQLVWDAMQSGVRKAIYEEKEKKKQNENFPPCMRVEHIGIAKPQFIRWLEEWTNEFCEEYTKYFEDMKSKCDPPKRADDCGDNTNIECKKACANYTNWLNPKRIEWNGMSNYYNKIYRKSNKESEDGKDYSMIMEPTVIDYLNKRCHGEINGNYICCSCKNIGENYNPSPAQKTKGSKKKDEQCEDNKGPLDLMNEVLNKMDEKYSAH

SEQ ID NO: 43 - protein, 1355 aa, Artificial Sequence
  synthetic
MDKSSIGDKIEEYLKEKSDDSKIDELLKADPSEVEYYRSGGDGDYLKNNICKITVNHSDSGKYEPCDRIPPPYGDNDQWKCQQNLYKASENNKNVFVPPRRQRMCINNLENLNVERIRDKHAFLADVLLTARNEGERIVQNHPDTNSSNVCIALERSFADIADIIRGRDGNKCETKSTNNVEELIKKFFEKNYRENKEYKRKYPNDDPKYTKLREDWWTKNRQKVWEVITCGARSNDLLIKRGWTTSKESEGENKLELCRKCGHYEEKVPTKLDYVPQFLRWLTEWIEDLYREKQNLIDDMERHREECTSEDHKSKEGASYCNMCKDKCKKYCECVKKWKSEWENQKNKYKDLYQQENETSSSSKKKSRYDDYVKEFFKKLNEANYSSLENYIKDDPYSKEYVTKLSFIPNSSDANTSSEKIQKNNDEVCNPNESGISSVEQAQTSGPSSNKTCITHSSIKANKKKECKDVKLGVRENDKDLKICVIEDTSLSGVDNCCCQDLLGILQENCSDNKRGSSSNDSCDNKNQDECQKKLDEALESLHNGYKNQKCKSGTSTVNKKWIWKKSSGNKEGLQKEYANTIGLPPRTQSLYLGNLPKLENVSKGVTDIIYDTKEKFLAGCLIVSFHEGKNLKTSHEKKNDDNGKKLCKALEYSFADYGDLIKGTSIWDNEYTKDLELNLQKAFGKLFRKYIKKNISAEQDTSYSSLDELRESWWNTNKKYIWIAMKHGAGMNGTTCCGDGSSGENQTNSCDDIPTIDLIPQYLRFLQEWVEHFCEQRQAKVKDVITNCKSCKNTSGERKIGGTCNGECKTKCKNKCEAYKTFIEHCKGGDGTAGSSWVKRWDQIYKRYSKHIEDAKRNRKAGTKSCGTSTAENKCVQSDIDSFFKHLIDIGLTTPSSYLSIVLDENNCGEDKAPWTTYTTTKNCDIQKDKSKSQSSDTLVVVNVPSPLGNTPHGYKYACQCKIPGGGGSGGGGSAEKKNNKSLCHEKGNDRTWSKKYIKKLENGRTLEGVYVPPRRQQLCLYELFPIIIKNKNDITNAKEELLETLQIVAEREAYYLWKQYNPTGKGIDDANKKACCAIRGSFYDLEDIIKGNDLVHDEYTKYIDSKLNEIFGSSNKNDIETKRARTDWWENETITNGTDRKTIRQLVWDAMQSGVRKAIDEEKEKKKPNENFPPCMGVEHIGIAKPQFIRWLEEWTNEFCEEYTKYFEDMKSNCNRRKGADDCGDNTNIECKKACANYTNWLNPKRIEWNGMSNYYNKIYRKSNKESEDGKDYSMIMEPTVIDYLNKRCNGEINGNYICCSCKNIGAYNTTSGTVNKKLQKKETECEDNKGPLDLMNEVLNKMDEKYSKLNL

SEQ ID NO: 44 - protein, 1363 aa, Artificial Sequence
  synthetic
MDSTSTIGDKIEAYLGAKSNDSKIDQSLKADPSKVQYYGSGGDGYYLKNNICKITVNHSDSGTNDPCEKKELSYGDNDQWKCQQNSSDGSENNKNIFVPPRRQRMCIKNLEKLNVDKIRDKHAFLADVLLTARNEGERIILYHPDTNSSNVCVALERSFADIADIIRGTDQLKGSNILEQNLKQMFAKIREKDKVLQDKYPNDDENYKKLREDWWNANRQKVWEVITCSARSNDLLIKRRWTTSKESEGENKLELCRKCGHYEEKVPTKLDYVPQFLRWLTEWIEDLYREEQNLIDDMERHREECTRKNVESNEGASYCNMCKEKHTKYCECVKKWKSEWENQKNKYTELYEQENETSQKNTSRYDDYVKDFFEKLKGNGYSSANSYVKDDPYSAEYVTKLSFILNSSDANTSSETPSKYYDEVCNCNESEISSVGQAQTSGPSSNKTCITHSSIKTNKKKVCKDVKLGINNNDKVLRVCVIEDTSLSGVDNCCCQDLLGILQENCSDKNQSGSSSNGSCNNKNQDECQKKLEKVFASLTNGYKCDKCKSGTSRSKKKWIWRKSSGNEEGLQKEYANTIGLPPRTQSLYLGNLPKLENVCKGVTDIIYDTKEKFLSGCLIAAFHEGKNLKTSHEKKNDDNGKKLCKALEYSFADYGDLIKGTSIWDNDFTKDLELNLQKIFGKLFRKYIKKNNTAEQDTSYSSLDELRESWWNTNKKYIWTAMKHGAGMNSTTCSGDGSVTGSGSSCDDMPTIDLIPQYLRFLQEWVEHFCKQRQEKVKDVITNCNSCKECGDTCNGECKTECKTKCKGECEKYKNFIEECNGTADGGTSGSSWSKRWDQIYKRYSKYIEDAKRNRKAGTKNCGTSSTTNAAASTTENKCVQSDIDSFFKHLIDIGLTTPSSYLSNVLDDNICGEDKAPWTTYTTYTTKNCDIQKKTPKPQSCDTLVVVNVPSPLGNTPHGYKYVCECKIPGGGGSGGGGSAEKKNNKSLCHEKGNDRTWSKKYIKKLENGRSLEGVYVPPRRQQLCLYELFPIIIKNEEGMEKAKEELLETLQIVAEREAYYLWKQYNPTGKGIDDANKKACCAIRGSFYDLEDIIKGNDLVHDEYTKYIDSKLNEIFGSSNKNDIDTKRARTDWWENETIDVANGTDHKTIRQLVWDAMQSGVRKAIDEENEKKKQNKNFPPCMGVEHIGIAKPQFIRWLEEWTNEFCEEYTKYFGAINSNCNRRKGADDCGDNSNIECKRACANYTNWLNPKRIEWNGMSNYYNKIYRKSNKESEDGKDYSMIMAPTVIDYLNKRCNGEINGNYICCSCKNIGENYNPSPAQKTKGSKKKDEQCEDNKGPLDLMNEVLNKMDEKYSAHKM

SEQ ID NO: 45 - protein, 1360 aa, Artificial Sequence
  synthetic
MDSTSTIGDKIEEYLGAKSNDSKIDQSLKADPSKVQYYGSGGDGYYLKNNICKITVNHSDSGKYEPCDSIPPPYGDNDQWKCDENLFKASGNHKNICVPPRRQHMCIKNLENLKFDKIRDKHAFLADVLLTARNEGERIILYHPDTNSSNVCVALERSFADIADIIRGTDQWKGTNKFEPYLKQMFAKIREKDKVLQDKYQNDDENYKKLREDWWNANRQKVWEVITCGARSNDLLIKRRWRTSGKSNGENKLELCRKCGHYEKEVPTYLDYVPQFLRWLTEWIEDLYREEQNLIDDMERHREECTRKNVDSKEGTSYCNMCKEKHTKYCEFVNKWKSEWKNQENKYKDLYQQENKTSSSSKNTSRYDNYVKEFFEKLEANYKSLENYIKGDPYFAEYVTKLSFILNSSDANTSSGETANHNDEACNRNESEISSVEQAPISGPSSNKTCNTHSSIKANKKKECKDVKLGINNNDKDLKICVIEDTSLSGVDNCCCQDFLRMLQENCSDNKRGSSSNGSCDNKNQDECQTKLDEALASLTNGYKCEKCKSEQSKKNNNQWIWKKSRGTEGGLQEEYANTIALPPRTQSLCLVCLHEKEEKTQHKTISTNSELLKEWIIAAFHEGKNLKKRYHQNKNADNEKKKGENKKKLCKALKYSFADYGDLIKGTSIWDNEYTKDLELNLQQIFGKLFRKYIKKNISTEQDTLYSSLDELRESWWNTNKKYIWLAMKHGAEMNGTTCCGDGSSGENQTNSCDDIPTIDLIPQYLRFLQEWVEHFCKQRQENVNAVIENCKSCKECGGTCGSDCKTECEKKCKAYKEFIEKCEGQAAEGTSGYSWSKRWDQIYKRYSKYIEDAKRNRKAGTKNCGTSSGATSGVTTTENKCVQSDIDSFFKHLIDIGLTTPSSYLSIVLDDNICGADNAPWTTYTTYTTKNCDKEKDKSKSQSCDTAVVVNVPSPLGNTPHGYKYACQCKIPGGGGSGGGGSAEKKNNKSLCHEKGNDRTWSKKYIKKLENGRTLEGVYVPPRRQQLCLYELFPIIIKKEKDMEKAKELLETLQIVAEREAYYLWKQYNPTGKGIDDANKKAHKKACCAIRGSFYDLEDIIKGNDLVHDEYTKYIDSKLNEIFGSSNTNDIETKRARTDWWENETIGVANGTDSKTIRQLVWDAMQSGVIYAEEKKENFPPCMRVEHIGIAKPQFIRWLEEWTNEFCEKYTKYFEDMKSKCDPPKGADDCDDNSNIECKRACANYTNWLNPKRIEWNGMSNYYNKIYRKSNKESEDGKDYSMIMEPTVIDYLNKRCHGEINGNYICCSCKNIGENSTSGTVNKKLQKKETECEDNKGPLDLMNEVLNKMDKKYSAHKM

SEQ ID NO: 46 - protein, 1348 aa, Artificial Sequence
  synthetic
MDKSSIGDKIEAYLEKKSDESDIEQSLKADPSEVEYYRSGGDGDYLRKNICKITVNHSDSGKYEPCDRKELSYGDIDEWKCQQNSSDGSEKPENICVPPRRQRMCIKNLENLKFDKIRDNNAFLADVLLTARNEGERIVQNHPDTNSSNVCVALERSFADLADIIRGTDQWKGTNKFEPCLKQMFAKIRENDKVLQDKYPNDDPKYTKLREDWWNANRQKVWEVITCGARSNDLLIKLGWTSSKESEGDNKLELCRKCGHYEEKVPTKLDYVPQFLRWLTEWIEDFYREKQNLIDGMERHREECTRKNVESKEGTSYCTNCKEKCKKYCEYVNKWKSEWENQKNKYNDLYQQENKTSSSSKKKSRYDDYVKEFFKNFKGDNYKSLENYIKGDPYFAEYATKLSFILNSSDTENASETPSKYYDEACNCNESEIASVGQAQTSGPSSNKTCITHSSIKTNKKKECKDVKLGINNNDKVLRVCVIEDTSLSGVDNCCCQDLLGILQENCSDNKRGSSSNGSCDKNSEEICQKKLEKVFASLTNGYKCDKCKSGTSRSKKKWIWKKSSGNEEGLQKEYANTIGLPPRTQSLCLVCLHEKEGKTQHKTISTNSELLKEWIIAAFHEGKNLKTSHEKKNDDNGKKLCKALEYSFADYGDLIKGTSIWDNEYTKDLELNLQKIFGKLFRKYIKKNNTAEQHTSYSSLDELRESWWNTNKKYIWTAMKHGAGMNGTTCSCSGDSSNDMPTIDLIPQYLRFLQEWVEHFCKQRQEKVNAVIENCNSCKESGGTCNSDCKTECKNKCEAYKEFIEDCKGGGTGTAGSPWSKRWDQIYKRYSKHIEDAKRNRKAGTKNCGTSSTTNAAASTDENKCVQSDVDSFFKHLIDIGLTTPSSYLSNVLDDNICGADKAPWTTYTTYTTTKNCDIQKKTPKSQSCDTLVVVNVPSPLGNTPHEYKYACECKIPGGGGSGGGGSDKGQNNKSLCHEKGNDRTWSKKYIKKLENGRTLEGVYVPPRRQQLCLYELFPIIIKKEKDMEKAKEELLETLQIVAEREAYYLWKQYHAHNDTTYLAHKKACCAIRGSFYDLEDIIKGNDLVHDEYTKYIDSKLNEIFGSSNKNDIETKRARTDWWENETIDVANGTDRKTIRQLVWDAMQSGVRKAIDEEKEKKKPNKNFPPCMGVEHIGIAKPQFIRWLEEWTNEFCEEYTKYFGAINSNCNLRKGADDCGDNSNIECKRACANYTNWLNPKRIEWNGMSNYYNKIYRKSNKESEDGKDYSMIMEPTVIDYLNKRCNGEINGNYICCSCKNIGENSTSPVANKKAQRKETECEEEKGPLDLMNEVLNKMDEKYSAHKM

SEQ ID NO: 47 - protein, 1372 aa, Artificial Sequence
  synthetic
MDKSSIGDKIEEYLKEKSNDSKIDQSLKADPSEVQYYRSGGDGYYLKNNICKITVNHSDSGTNDPCDRKELSYGDNDQWKCDENLYKASENNKNIFVPPRRQRMCIKNLEKLNVEKIRDKHAFLADVLLTARNEGERIVQNHPDTNSSNVCVALERSFADLADIIRGRDGNKCETKSTNNVEELIKKFFEKNYRENKEYKRKYRNDDPKYTKLREDWWTKNRQKVWEVITCSARSNDLLIKRRWRTSGKSNGENKLELCRKCGHYEKEVPTKLDYVPQFLRWLTEWIEDLYREKQNLIDGMERHREECTSEDDKSKEVTSYCNMCKDKCKKYCEYVNKWKSEWENQKNKYTELYEQNKNKTSQKNASRYDDYVKDFFKKLNEANYKSLDDYIKDDPYSKEYVTKLSFILNSSDANTSSGETANHNDEACNPNESEISSVGQAPISDPSSNKTCITHSSIKANKKKECKHVKLGVRENDKVLRVCVIEDTSLSGVDNCCCQDLLGMLQEPRIDKNQRGSSSNGSCDKNSEEICQKKLDEALASLTNGYKCDKCKSGTSTVNKNWIWKKYSGKEGGLQEEYANTIGLPPRTQSLCLVCLHEKEGKTQHKTISTNSELLKEWIIDAFHEGKNLKTSHQNKNSGNKENLCKDLKYSFADYGDLIKGTSIWDNEYTKDLELNLQKAFGKLFRKYIKKNNTAEQHTSYSSLDELRESWWNTNKKYIWLAMKHGAGMNGTTCCGDGSVTGSSDSGSTTCSGDNGSISCDDIPTIDLIPQYLRFLQEWVEHFCKQRQEKVKPVITNCNSCKNTSSKTKLGGTCNSDCEKKCKDECEKYKKFIEEFCTAAGGTSGSPWSKRWDQIYKRYSKYIEDAKRNRKAGTKNCGPSSTTSTAENKCVQSDIDSFFKHLIDIGLTTPSSYLSIVLDENNCGEDNAPWTTYTTYTTTKNCDIQKKTPKSQSCNTAVVVNVPSPLGNTPHGYKYACQCKIPGGGGSGGGGSAEKKNNKSLCHEKGNDRTWSKKYIKKLENGRTLEGVYVPPRRQQLCLYELFPIIIKNEEGMEKAKEELLETLQIAAEREAYYLWKQYHAHNDTTYLAHKKACCAIRGSFYDLEDIIKGNDLVHDEYTKYIDSKLNKIFGSSNKNDIETKRARTDWWENEAIGVANGTDHKTIRQLVWDAMQSGVRYAVEEKKKKKQNENFPPCMGVEHIGIAKPQFIRWLEEWTNEFCEEYTKYFGAINSKCNLRKGADDCDDNSNIECKRACANYTNWLNPKRIEWNGMSNYYNKIYRKSNKESEDGKDYSMIMEPTVIDYLNKRCHGEINGNYICCSCKNIGENSTSPVANKKAQRKDEQCEDNKGPLDLMNEVLNKMDEKYSEHKM

SEQ ID NO: 48 - protein, 1364 aa, Artificial Sequence
  synthetic
MDSKTTIGDKIEAYLEKKSNESDIDQSLKADPSEVEYYRSGGDGDYLRKNICKITVNHSDSGKYEPCDSIPPPYGDIDEWKCQQNSSDGSEKPENVFVPPRRQRMCIKNLENLNVERIRDNNAFLADVLLTARNEGERIVQNHPDTNSSNVCIALERSFADLADIIRGTDQWKGTNSNLEQNLKQMFKNILEKGSTIQSNYSKKDQNYTKLREDWWTKNRQKVWEVITCGARSNDLLIKRRWTTSKESEGENKLELCRKCGHYEGKVPTKLDYVPQFLRWLTEWIEDFYREKQNLIDGMERHREECTREDHKSKEGASYCSTCKDKCKKYCECVKKWKSEWENQKNKYKDLYQQENETSSSSKKKSRYDDYVKEFFKNFKGDNYKSLDDYIKGDPYSKEYTTKLSFILNPSDANTSSEKIQKNNDEACNCNESEIASVEQASISDRSSQKAYITHSSIKANKKKVCKHVKLGVRENDKVLRVCVIEDTSLSGVENCCFKDFLRIVEEPRIDKNQRGSSSNGSCNNNNEEACEKNLDEALASLTNCYKCDKCKSEQSKKNNNKWIWRKFPGNGEGLQKEYANTIGLPPRTQSLCLVCLHEKEGKTQELKNIRTNSELLKEWIIDAFHEGKNLKTSHQKKNAENKKKLCKALEYSFADYGDLIKGTSIWDNEYTKDLELNLQKIFGKLFRKYIKKNISTEQHTSYSSLDELRESWWNTNKKYIWTAMKHGAEMNSTMCNVDGSVTGSSDSGSTTCSGDNGSISCDDIPTIDLIPQYLRFLQEWVEHFCKQRQAKVNAVIKNCNSCKESGGTCNGDCKTKCKVACDAYKKFIEECRTAAEGTAGSSWVKRWYQIYMRYSKHIEDAKRNRKAGTKSCGTSTAESKCVQSDIDSFFKHLIDIGLTTPSSYLSNVLDENNCGADKAPWTTYTTYTTYTTYTTTKNCDIQKDKSKSQSCNTAVVVNVPSPLGNTPYEYKYACECKIPGGGGSGGGGSDKGQSNKSLCHEKGNDRTWSKKYIKKLENGRTLEGVYVPPRRQQLCLYELFPIIIKKEKDMENVKKELLETLQIVAEREAYYLWKQYNPTGKGIDDANKKACCAIRGSFYDLEDIIKGNDLVHDEYTKYIDSKLNEIFGSSNKNDIETKRARTDWWENETITNRTDRKTIRQLVWDAMQSGVRYAVEEKNENFPPCMGVEHIGIAKPQFIRWLEEWTNEFCEEYTKYFEDMKSKCDLRKGADDCGDNTNIECKRACANYTNWLNPKRIEWNGMSNYYNKIYRKSNKESEDGKDYSMIMEPTVIDYLNKRCNGEINGNYICCSCKNIGENYNPSPAQKTKGSKKKDEQCEDNKGPLDLMNEVLNKMDPKYSKLNL

SEQ ID NO: 49 - protein, 1388 aa, Artificial Sequence
  synthetic
MDSTSTIANKIEEYLKEKSNESDIDQSLKADPSEVEYYRSGGDGDYLRKNICKITVNHSDSGKYDPCDRKELSYGDNDQWKCDENLSKVSEKPENICVPPRRQRMCIKNLENLNVERIRDKHAFLADVLLTARNEGERIVQNHPDTNSSNVCIALERSFADLADIIRGTDQWKGTNSNLEKNLKQMFAKIRENDKVLQDKYPNDDPKYTKLREGWWNANRQKVWEVITCSARSNDLLIKRRWTTSKESEGENKLELCRKCGHYEGKVPTYLDYVPQFLRWLTEWIEDFYREKQNLIDGMERHREECTREDDKCKEGASYCSTCKDKCKKYCECVKKWKSEWENQKNKYTELYEQNKNKTSQKNTSRYDNYVKDFFEKLEANYKSLDDYIKDDPYFAEYATKLSFILNSSDANNPSGETANHNDEVCNPNESEISSVGQAQTSGPSSNKTCITHSSIKTNKKKVCKYVKLGVRENDKDLKICVIEDTSLSGVDNCCCQDLLGILQENCSDNKRGSSSNGSCNNNNEEACEKNLEKVLASLTNGYKNQKCKSEQSKKNNNKWIWKKSSGNGEGLQKEYANTIGLPPRTQSLYLGNLRKLGNVCEDVKDINFDTKEKFLAGCLIAAFHEGKNLKTTYLEKKKGDNGKKLCKDLKYSFADYGDLIKGTSIWDNDFTKNVELNLQQIFGKLFRKYIKKNNTAEQDTSYSSLDELRESWWNTNKKYIWLAMKHGAGMNGTTCSSGSGDNGDSSITGSSDSGSTTCSGDNGSISCDDIPTIDFIPQYLRFLQEWVENFCEQRQAKVNAVINSCNSCKNTSGERKIGDTCNSDCKTECKNKCEAYKTFIDNVGDGTAGSPWVKRWDQIYKRYSKHIEDAKRNRKAGTKNCGITTGTISGESSGATSGVTTTENKCVQSDIDSFFKHLIDIGLTTPSSYLSIVLDENNCGEDKAPWTTYTTYTTYTTYTTTKNCDIQKDKSKLQQSNTAVVVNVPSPLGNTPHEYKYACQCKIPGGGGSGGGGSDKGQNNKSLCHEKGNDRTWSKKYIKKLENGRSLEGVYVPPRRQQLCLYELFPIIIKKEKDMEKAKEELLETLKIVAEREAYYLWKQYHAHNDTTYLAHKKACCAIRGSFYDLEDIIKGNDLVHDEYTKYIDSKLNEIFGSSNTNNIDTKRARTDWWENETITNGPDRKTIRQLVWDAMQSGVRYAVEEKKENFPPCMGVEHIGIAKPQFIRWLEEWTNEFCEEYTKYFEDMKSKCDPPKSADDCGDNTNIECKKACANYTNWLNPKRIEWNGMSNYYNKIYRKSNKESEDGKDYSMIMEPTVIDYLNKRCNGEINGNYICCSCKNIGAYNTTSGTVNKKLQKKETECEDNKGPLDLMNEVLNKMDEKYSAHKM

SEQ ID NO: 50 - protein, 1349 aa, Artificial Sequence
  synthetic
MDKSSIGDKIEAYLEKKSNESDIDQSLKADPSEVQYYGSGGDGYYLKNNICKITVNHSDSGTNDPCDRKELSYGDIDEWKCQQNSSDGSGKPENICVPPRRQRMCINNLEKLKFDKIRDKHAFLADVLLTARNEGERIVQNHPDTNSSNVCVALERSFADIADIIRGTDLWKGTNSNLEQNLKQMFAKILEKDKVLQDKYPKDQNYTKLREAWWNANRQKVWEVITCSARSNDLLIKRRWTTSGKSNGDNKLELCRKCGHYEEKVPTYLDYVPQFLRWLTEWIADLYREKQNLIDGMERHREECTREDHKSKEGTSYCNMCKDKCKKYCECVKKWKSEWENQKNKYKDLYEQNKNKTSQKNTSRYDDYVKEFFKKLEANYKSLDDYIKDDPYSKEYVTKLSFIPNSSDTENASEKIQKNNDEVCNPNESGISSVGQAQTSGTSSNKTCITHSSIKTNKKKVCKHVKLGINNNDKVLRVCVIEDDSLRGVDNCCCQDFLRMLQENCSDNKRGSSSNDSCNNKNQEACEKNLDEALASLTNGYKCDKCKSGTSTVNKNWIWRKSSGNKEGLQKEYANTIGLPPRTQSLCLVCLHEKEGKTQELKNISTNSELLKEWIIAAFHEGKNLKTTYPQNKNAENKKKLCKALKYSFADYGDLIKGTSIWDNEYTKDLELNLQKIFGKLFRKYIKKNNTAEQHTSYSSLDELRESWWNTNKKYIWTAMKHGAGMNGTTCSSGSGDNGSISCDDIPTIDLIPQYLRFLQEWVEHFCEQRQGKVKDVITNCKSCKESGDTCKTECKTKCKDECEKYKTFIEDCNGGGTGTAGSSWSKRWDQIYKRYSKYIEDAKRNRKAGTKNCGPSSTTSTAESKCVQSDIDSFFKHLIDIGLTTPSSYLSIVLDDNICGADKAPWTTYTTYTTTENCDIQKKTPKSQSCNTAVVVNVPSPLGNTPHGYKYACECKIPGGGGSGGGGSAEKKNNKSLCHEKGNDRTWSKKYIKKLENGRSLEGVYVPPRRQQLCLYELFPIIIKKEKDMENVKKELLETLQIVAEREAYYLWKQYNPTGKGIDDANKKACCAIRGSFYDLEDIIKGNDLVHDEYTKYIDSKLNEIFGSSNKNDIDTKRARTDWWENETFQVSNITGANKSDPKTIRQLVWDAMQSGVRYAVEEKNENFPPCMGVEHIGIAKPQFIRWLEEWTNEFCEKYTKYFEDMKSNCNRRKGADTCGDNSNIECKRACANYTNWLNPKRIEWNGMSNYYNKIYRKSNKESEDGKDYSMIMEPTVIDYLNKRCHGEINGNYICCSCKNIGEYNSTSGTVNKKLQKKETECEEEKGPLDLMNEVLNKMDEKYSAHKM

SEQ ID NO: 51 - protein, 1370 aa, Artificial Sequence
  synthetic
MDKSSIANKIEEYLKEKSDDSKIDQSLKADPSEVQYYGSGGDGYYLKNNICKITVNHSDSGTNDPCEKKLLPYGDNDQWKCDENLSKVSGKPENICVPPRRQRMCINNLEKLKFDKIRDKHAFLADVLLTARNEGEKIVQNHPDTNSSNVCVALERSFADLADIIRGRDGNKCETKSPNNVEELIKKFFEKNYRSNEEYRKKYPNDDENYKKLREAWWNANRQKVWEVITCSARSNDLLIKRRWRTSKESNGENKLELCRKCGHYEKEVPTKLDYVPQFLRWLTEWIEDFYREKQNLIDDMERHREECTREDDKCKEGTSYCNMCKEKHTKYCECVKKWKTEWENQENKYTELYEQNKNKTSQKNTSRYDDNVKEFFEKLKGNGYSSANSYVKNNPYSSEDGKLLKFDNTNAFKESITCNKNVCSCSGNEKLIISEGSLSSSSFGTSSSYQSSIITSKKRNECAQIKFSGNENNMNIKICSTQDNNLLVKLEDLLKGFCDTCDTGIGVEVVSENNCEEQYKKLLPSLEKCTVLNCNECNKTVFKNLKKQQEKWIWGKPKQEAAGLQEEYANTIGLPPRTQLLYLVCLHEKEGKTQELKNISTNSELLKEWIIAAFHEGKNLKPSHQNKNDDNGKKLCKDLKYSFADYGDLIKGTSIWDNDFTKDLELNLQKIFGKLFRKYIKKNISTEQDTLYSSLDELRESWWNTNKKYIWLAMKHGAGMNSTTCNGDGSVTGSSDSGSTTCSGDNGSISCDDIPTIDLIPQYLRFLQEWVEHFCKQRQEKVNAVITNCKSCKNTSGERKIGDTCGNDCEKKCKVACDAYKEFIEECRTAAEGTAGSSWVKRWDQIYKRYSKYIEDAKRNRKAGTKNCGPSSTTNAAESKCVQSDIDSFFKHLIDIGLTTPSSYLSIVLDENNCGEDNAPWTTYTTYTTTKNCDIQKDKSKSQSCNTAVVVNVPSPLGNTPHGYKYACECRTPGGGGSGGGGSDKGQNNKSLCHEKGNDRTWSKKYIKKLENGRSLEGVYVPPGRQQLCLYELFPIIIKNEEGMEKAKKELLETLQIVAEREAYYLWKQYHAHNDTTYLAHKKACCAIRGSFYDLEDIIKGNDLVHDEYTKYIDSKLNKIFGSSNTNNIETKRARTDWWENKTIDVPNITDANKSDSKTIRQLVWDAMQSGVRKAIDEENEKKKPNENFPPCMGVEHIGIAKPQFIRWLEEWTNEFCEKYTKYFEDMKSNCDPPKSADDCGDNTNIECKKACANYTNWLNPKRIEWNGMSNYYNKIYRKSNKESEDGKDYSMIMEPTVIDYLNKRCHGEINGNYICCSCKNIGAYNTTSGTVNKKLQKKETECEDNKGPLDLMNEVLNKMDPKYSKLNL

SEQ ID NO: 52 - protein, 1380 aa, Artificial Sequence
  synthetic
MDSTSTIADKIEEYLEKKSDESNIEQSLKADPSEVQYYGSGGDGYYLKNNICKITVNHSDSGKYEPCDRIPPPYGDNDQWKCQQNSSDGSGNHKNICVPPRRQRMCINNLEKLNVDKIRDKHAFLADVLLTARNEGERIVQNHPDTNSSNVCVALERSFADLADIIRGRDENKCETKSTNNVEELIKNFFGKNYRSNEEYKRKYRNDDPKYTKLRESWWTKNRQKVWEVITCGARSNDLLIKRGWRTSKESEGENKLELFRKCGHYEEKVPTKLDYVPQFLRWLTEWIEDLYREKQNLIDDMERHREECTSEDDKCKEVTSYCSTCKDKCKKYCEFVKKWKSEWKNQKNKYTELYEQNKNKTSSSSKNTSRYDDYVKEFFKKLNEANYKSLDDYIKGDPYSAEYVTKLSFILNPSDANNPSGETANHNDEVCNCNESEIACVELAQTSGSSSNKTCITHSSIKANKKKVCKDVKLGINNNDKDLKICVIEDTSLSGVENCCCQDFLRMLQENCSDNKSGSSSNGSCNNNNEDECQKKLEKVFASLTNGYKCDKCKSEQSKKNNNIWIWRKSSGDEKGLQKEYANTIGLPPRTQSLYLGNLPKLENVCEDVTDINFDTKEKFLAGCLIAAFHEGKNLKKRYHQNKNDENKKKLCKALKYSFADYGDLIKGTSIWDNEYTKDLELNLQKIFGKLFRKYIKKNISTEQDTLYSSLDELRESWWNTNKKYIWLAMKHGTTCSSGSGDNGDGSVTGSSDSGSTTCCGDGSVTGSGSSCDDIPTIDLIPQYLRFLQEWVEHFCKQRQEKVNAVINSCNSCKNTSSKTKLGDTCKTECKNKCEAYKNFIEDCKGGDGTAGSSWVKRWYQIYMRYSKYIEDAKRNRKAGTKSCGTSSGATSGVTTTENKCVQSDIDSFFKHLIDIGLTTPSSYLSIVLDDNICGADKAPWTTYTTYTTKNCDKDKKKSKSQSCDTLVVVNVPSPLGNTPHGYKYVCECRTPGGGGSGGGGSDKGQNNKSLCHEKGNDRTWSKKYIKKLENGRTLEGVYVPPRRQQLCLYELFPIIIKKENDITNAKKELLETLQIVAEREAYYLWKQYNPTGKGIDDANKKAHKKACCAIRGSFYDLEDIIKGNDLVHDEYTKYIDSKLNKIFGSSNTNNIDTKRARTDWWENEIITNGTDSKTIRQLVWDAMQSGVRYAVEEKNENFPPCMGVEHIGIAKPQFIRWLEEWTNEFCEKYTKYFEDMKSKCDPPKSADDCGDNSNIECKRACANYTNWLNPKRIEWNGMSNYYNKIYRKSNKESEDGKDYSMIMEPTVIDYLNKRCNGEINGNYICCSCKNIGENSTSPAQKTKGSKKKDEQCEDNKGPLDLMNEVLNKMDEKYSEHKM

SEQ ID NO: 53 - protein, 1357 aa, Artificial Sequence
  synthetic
MDSTSTIGDKIEEYLGAKSNESNIDQSLKADPSKVQYYRSGGDGYYLKNNICKITVNHSDSGTNDPCDRKELSYGDNDQWKCQQNSSDGSENNKNIFVPPRRQRMCINNLENLKFERIRDKHAFLADVLLTARNEGEKIVQNHPDTNSSNVCVALERSFADLADIIRGTDQWKGTNSNLEQNLKQMFKKILEKDSTLKNNYSNDDENYKKLREAWWNANRQKVWEVITCGARSNDLLIKRRWTTSKESNGENKLELCRKCGHYEEKVPTKLDYVPQFLRWLTEWIEDLYREEQNLIDDMERHREECTSEDDKSNEGTSYCTNCKEKHTKYCECVKKWKTEWENQKNKYNDLYQQKKNETSSSSKKKSRYDDYVKDFFKKLKGNVYSSANSYVKNDPYSKEYVTKLSFILNPSDANTSSGETANHNDEVCNCNESGIACVGQAQISDRLSQKACNTHSSIKTNKKKECKHVKLGVRENDKVLKICVIEHTSLSGVENCCCQDFLRILQENCSDNIRGSSSNGSCNNKNQDECEKNLDEALASLTNCYKCEKCKSEQSKKNNKNWIWKKYSVKEEGLQKEYANTIGLPPRTQSLYLGNLRKLENVCKDVTDINFDTKEKFLAGCLIAAFHEGKNLKTTYLEKKNDDNGKKLCKALKYSFADYGDLIKGTSIWDNDFTKDLELNLQKAFGKLFRKYIKKNNTAEQDTSYSSLDELRESWWNTNKKYIWTAMKHGTTCSSGSGDNGSISCDDMPTIDLIPQYLRFLQEWVEHFCKQRQEKVNAVITNCKSCKESGGTCNGECKTECEKKCKTKCKDECDAYKNFIENCKGGDGTAGSPWSKRWDQIYMRYSKYIEDAKRNRKAGTKNCGTSAAENKCVQSDIDSFFKHLIDIGLTTPSSYLSIVLDENICGDDNAPWTTYTTTEKCNKETDKSKSQQCNTAVVVNVPSPLGNTPHGYKYVCECRTPGGGGSGGGGSAEKKNNKSLCHEKGNDRTWSKKYIKKLENGRTLEGVYVPPRRQQLCLYELFPIIIKKEKDMEKAKEELLETLQIVAEREAYYLWKQYNPTGKGIDDANKKACCAIRGSFYDLEDIIKGNDLVHDEYTKYIDSKLNKIFGSSNTNNIDTKRARTDWWENKTIDVPKIDVANGTDSKTIRQLVWDAMQSGVRYAVEKNEKKKQNENFPPCMRVQHIGIAKPQFIRWLEEWTNEFCEKYTKYFEDMKSNCDPPKGADDCGDNSNIECKKACANYTNWLNPKRIEWNGMSNYYNKIYRKSNKESEDGKDYSMIMEPTVIDYLNKRCHGEINGNYICCSCKNIGENSTSPAQKTKGSKKKGEQCEDNKGPLDLMNEVLNKMDEKYSAHKM

SEQ ID NO: 54 - protein, 1387 aa, Artificial Sequence
  synthetic
MDSKTTIAEKIEAYLGAKSNDSKIDQSLKADPSEVQYYGSGGDGYYLKNNICKITVNHSDSGTNDPCDSIPPPYGDNDQWKCQQNSSDGSEKPENVFVPPRRQRMCIKNLENLNVDKIRDKHAFLADVLLTARNEGERIILYHPDTNSSNVCNALERSFADIADIIRGTDLWKGTNSNLEQNLRRMFAKIRENDKVLQDKYPKDQNYTKLREDWWNANRQKVWEVITCGARSNDLLIKRGWRTSGKSNGDNKLELCRKCGHYEEKVPTQLDYVPQFLRWLTEWIEDFYREKQNLIDDMERHREECTREYDKSKEGTSYCSTCKDKCKKYCECVKKWKSEWENQKNKYNDLYQQNKNKTSQKNTSRYDNYVKEFFKNFKGDNYKSLENYIKGDPYFAEYVTKLSFILNSSDANTSSEKIQKNNDEVCNCNESEIASVGQASISDPSSNKTCNTHSSIKANKKKVCKDVKLGVREKDKDLKICVIEDDSLRGVDNCCCQDLLGILQENCSDNKRGSSSNGSCNNKNQDECQKKLENVFASLTNGYKCDKCKSEQSKKNNNKWIWRKFPGKEGGLQKEYANTIGLPPRTQLLYLVCLHEKGKKTQELKNIRTNSELLKEWIIAAFHEGKNLKTTYPQKKNDDNGKKLCKDLKYSFADYGDLIKGTSIWDNDFTKDLELNLQQIFGKLFRKYIKKNNTAEQDTSYSSLDELRESWWNTNKKYIWTAMKHGAGMNSTMCNADGSVTGSSDSGSTTCSGDNGSISCDDIPTIDLIPQYLRFLQEWVEHFCEQRQAKVNAVITNCKSCKESGGTCNSDCKTECKNKCKVACDAYKTFIEDCKGGGTGTAGSSWVKRWYQIYMRYSKYIEDAKRNRKAGTKSCGTSSGANSGVTTAENKCVQSDIDSFFKHLIDIGLTTPSSYLSNVLDENNCGEDKAPWTTYTTYTTYTTYTTTKNCDKDKKKSKSQSCDTLVVVNVPSPLGNTPHGYKYACECKIPGGGGSGGGGSAEKKNNKSLCHEKGNDRTWSKKYIKKLENGRTLEGVYVPPRRQQLCLYELFPIIIKKEKDMEKAKKELLETLKIVAEREAYYLWKQYNPTGKGIDDANKKACCAIRGSFYDLEDIIKGNDLVHDEYTKYIDSKLNEIFGSSNKNDIDTKRARTDWWENETIDVPNITGANKSDSKTIRQLVWDAMQSGVRKAIYEEKEKKKQNENFPPCMRVEHIGIAKPQFIRWLEEWTNEFCEEYTKYFEDMKSKCDPPKRADDCGDNTNIECKKACANYTNWLNPKRIEWNGMSNYYNKIYRKSNKESEDGKDYSMIMEPTVIDYLNKRCHGEINGNYICCSCKNIGENYNPSPAQKTKGSKKKDEQCEDNKGPLDLMNEVLNKMDEKYSAHKM

SEQ ID NO: 55 - protein, 3093 aa, Plasmodium falciparum
MDKSSIGDKIEEYLKEKSDDSKIDELLKADPSEVEYYRSGGDGDYLKNNICKITVNHSDSGKYEPCDRIPPPYGDNDQWKCQQNLYKASENNKNVFVPPRRQRMCINNLENLNVERIRDKHAFLADVLLTARNEGERIVQNHPDTNSSNVCIALERSFADIADIIRGRDGNKCETKSTNNVEELIKKFFEKNYRENKEYKRKYPNDDPKYTKLREDWWTKNRQKVWEVITCGARSNDLLIKRGWTTSKESEGENKLELCRKCGHYEEKVPTKLDYVPQFLRWLTEWIEDLYREKQNLIDDMERHREECTSEDHKSKEGASYCNMCKDKCKKYCECVKKWKSEWENQKNKYKDLYQQENETSSSSKKKSRYDDYVKEFFKKLNEANYSSLENYIKDDPYSKEYVTKLSFIPNSSDANTSSEKIQKNNDEVCNPNESGISSVEQAQTSGPSSNKTCITHSSIKANKKKECKDVKLGVRENDKDLKICVIEDTSLSGVDNCCCQDLLGILQENCSDNKRGSSSNDSCDNKNQDECQKKLDEALESLHNGYKNQKCKSGTSTVNKKWIWKKSSGNKEGLQKEYANTIGLPPRTQSLYLGNLPKLENVSKGVTDIIYDTKEKFLAGCLIVSFHEGKNLKTSHEKKNDDNGKKLCKALEYSFADYGDLIKGTSIWDNEYTKDLELNLQKAFGKLFRKYIKKNISAEQDTSYSSLDELRESWWNTNKKYIWIAMKHGAGMNGTTCCGDGSSGENQTNSCDDIPTIDLIPQYLRFLQEWVEHFCEQRQAKVKDVITNCKSCKNTSGERKIGGTCNGECKTKCKNKCEAYKTFIEHCKGGDGTAGSSWVKRWDQIYKRYSKHIEDAKRNRKAGTKSCGTSTAENKCVQSDIDSFFKHLIDIGLTTPSSYLSIVLDENNCGEDKAPWTTYTTTKNCDIQKDKSKSQSSDTLVVVNVPSPLGNTPHGYKYACQCKIPTTEETCDDRKEYMNQWSCGSARTMKRGYKNDNYELCKYNGVDVKPTTVRSSSTKLDGNDVMFFNLFEQWNKEIQYQIEQYMTNANISCNNEMKVLSSSSEESQNQNGSDHHDGRNNNTDQSTNCKEKCECYKLWIEKIKKQWGKQKNNYNKFRSKQIYDANKGPQNKKVVSLSHFLFFSCWEEYIQKQFNGDWSKIKNIGSDTFEFLIKKCGNNSGDGETIFNKKLKNAEKKCKENESTDTKMKSSETSCDLNATNYIRGCQSKTYDGKIFPGKGGEKQWICKDTIIHGDTNGACIPPRTQNLCVGNLWDKSYGGRSNIKNDTKESLKNKLKNAIQKETELLYEYHDKGTAIISRNPMKEGGEDGKGKQKEGGEEANNNSNGLPKGFCHAVQRSFIDYKNMILGTSVNTYEYIGKLQEDIKKIIEKGTPQQKDKIGGVGSSTENVNAWWKGIEGEMWDAVRCAITKIKKQKKNGTFNGDECGVSPPTGNDEDQFVSWFKEWGEQFCIERLRYEQNIREACTINGKNEKKCINSKSGQGDKIQGACKRKCEKYKKYISEKKQEWDKQKTKYENKYVGKSASDLLKENYPECISANFDFIFNDNIEYKTYYPYGDYSSICSCEQVKYYKYNNAEKKNNKSLCHEKGNDRTWSKKYIKKLENGRTLEGVYVPPRRQQLCLYELFPIIIKNKNDITNAKEELLETLQIVAEREAYYLWKQYNPTGKGIDDANKKACCAIRGSFYDLEDIIKGNDLVHDEYTKYIDSKLNEIFGSSNKNDIETKRARTDWWENETITNGTDRKTIRQLVWDAMQSGVRKAIDEEKEKKKPNENFPPCMGVEHIGIAKPQFIRWLEEWTNEFCEEYTKYFEDMKSNCNRRKGADDCGDNTNIECKKACANYTNWLNPKRIEWNGMSNYYNKIYRKSNKESEDGKDYSMIMEPTVIDYLNKRCNGEINGNYICCSCKNIGAYNTTSGTVNKKLQKKETECEDNKGPLDLMNEVLNKMDEKYSKLNLKCTEVYLEHVEEQLNEIDNAIKDYQLYPLDRCFDDQTKMKICDLIGDAIGCKDKTKLDELDEWNDMDMRDPYNKYKGVLIPPRRRQLCFSRIVRGPANLRNLNEFKEEILKGAQSEGKFLGNYYNEDKDKEKKEDRKEKALEAMKNSFYDYEDIIKGSDMLANIQFKDIKRKLDKLLTKKTNNNIRNAEDWWKTNKKSIWNAMLCGYKKSGNKIIDPSWCKIPTTEKTPQFLRWIKEWGTNVCIQKEKYKQNVKLECSNVTNIDLSLQASESTKCIPEIRKYQEWSRKRSIQWEAISERYRKYKRMDEFKNVFNNANEPNANEYLKEYCSKCPCGFNDMEEITNDTENKQDIFKQIIEKVKIPAELEDVIYRLKHHEYNSNDYICNKYKNINVNMKKNNGNFVTDNFVKKSWEISNGVLIPPRRKNLFLNIKDTQICQYKRDPKLFNDFIYSSAFTEVEMLKKLYPKDRAKVVHAMKYSFTDIGSIIKGDDMMEKNSSDKIGKILGDTDGQNEKRKKWWDSNKYHIWESMLCGYKHAYGNISHDDKKKLDIPNNDNEHQFLRWFTEWAEDFCNNRYKELEKLKMSCPHNVCFLDEGTEKKCMEACEKYQNYVLSKKTEYEIQKNKYYAEFKNKNGNAKDAPEYFKDNCKNNCECFSKHIDIKKNWKEPYATLEDTFKSKCDCPKPVPPPPEKPQPPPLTPSDEPFDPTILQTTIPFGIALALGSIAFLFMKKKPKTPVDLLRVLDIHKGDYGIPTLKSSNRYIPYVSDTYKGKTYIYMEGDTSGDDDKYIWDLSSSDITSSESEYEELDINDIYVPSLPKYKTLIEVVLEPSKRDTFNTPSGDTFTNKLTDDEWNQLKQDFIEQYLQNIQKDFILHDSVNEKPFITQIQDRFLGSGHQVTYNIDWNVPENINRITNIMDDPKYSSNNLYTGTDLINDSLNGNQYIDIYDEMLKRKENELFGTYHTKYTTFNSVSKQTPSDPIINQLDLYHKWIDKHRDICEQWKTKEDMLYKSNEVWNMERKEYLLDIQPSTLDDIHKINDETYNIISTNNIYDHPSQETPLQLLGSTNIIPSYITTEQNNGLRTNISMDTYIDETNNNNVVATSIIGDDQMENSYNC

SEQ ID NO: 56 - protein, 3111 aa, Plasmodium falciparum
MDSTSTIGDKIEAYLGAKSNDSKIDQSLKADPSKVQYYGSGGDGYYLKNNICKITVNHSDSGTNDPCEKKELSYGDNDQWKCQQNSSDGSENNKNIFVPPRRQRMCIKNLEKLNVDKIRDKHAFLADVLLTARNEGERIILYHPDTNSSNVCVALERSFADIADIIRGTDQLKGSNILEQNLKQMFAKIREKDKVLQDKYPNDDENYKKLREDWWNANRQKVWEVITCSARSNDLLIKRRWTTSKESEGENKLELCRKCGHYEEKVPTKLDYVPQFLRWLTEWIEDLYREEQNLIDDMERHREECTRKNVESNEGASYCNMCKEKHTKYCECVKKWKSEWENQKNKYTELYEQENETSQKNTSRYDDYVKDFFEKLKGNGYSSANSYVKDDPYSAEYVTKLSFILNSSDANTSSETPSKYYDEVCNCNESEISSVGQAQTSGPSSNKTCITHSSIKTNKKKVCKDVKLGINNNDKVLRVCVIEDTSLSGVDNCCCQDLLGILQENCSDKNQSGSSSNGSCNNKNQDECQKKLEKVFASLTNGYKCDKCKSGTSRSKKKWIWRKSSGNEEGLQKEYANTIGLPPRTQSLYLGNLPKLENVCKGVTDIIYDTKEKFLSGCLIAAFHEGKNLKTSHEKKNDDNGKKLCKALEYSFADYGDLIKGTSIWDNDFTKDLELNLQKIFGKLFRKYIKKNNTAEQDTSYSSLDELRESWWNTNKKYIWTAMKHGAGMNSTTCSGDGSVTGSGSSCDDMPTIDLIPQYLRFLQEWVEHFCKQRQEKVKDVITNCNSCKECGDTCNGECKTECKTKCKGECEKYKNFIEECNGTADGGTSGSSWSKRWDQIYKRYSKYIEDAKRNRKAGTKNCGTSSTTNAAASTTENKCVQSDIDSFFKHLIDIGLTTPSSYLSNVLDDNICGEDKAPWTTYTTYTTKNCDIQKKTPKPQSCDTLVVVNVPSPLGNTPHGYKYVCECKIPTTEETCDDRKEYMNQWIIDTSKKQKGSGSTNNDYELYTYNGVQIKQAAGTLKNSKLDENDVMFFNLFEQWNKEIQYQIEQYMTNTKISCNNEKNVLSRVSEESQNQNGSDHHDGGNNNTDQGTNCKKNCECYELWIKKITEQWETQKKNYNKFQSKQIYDGNNASHKKEIVKLSHFLFFSCWEEYIQKYFNGDWSKIKNIGSDTFEFLIKKCGNNSGDGETIFSEKLKNAQQQCKEIQNTDTKINPSVISSVLNATNYIRGCQPKRYDGFISPGKGGEKQWICKDTITHGDTNGACIPPRTQNLCVGELWYKRYGGRSNIKNDTKESLKNKLKNAIQKETELLYEYHDTGTAIISRNPMKEGGEDGKGKQKEGGEEANNNSNGLPKGFCHAVQRSFIDYKNMILGTSVNIYEYIGKLQEDIKKIIEQERTKTKDKIGGSGADKVNDWWKGIEGEMWDAVKCAITKIKKQKKNGTYTGNECGVSPPTGNDEDQSVSWFKEWGEQFCIERLRYEQNIREACTINGKNEKKCINSKSGQEDKVEGACKRKCEKYKKYISEKKQEWDKQKTKYENKYVGKSASDLLKENYPECISANFDFIFNDKADHKKYYPYGDYSSICSCEQVKYYKYNNAEKKNNKSLCHEKGNDRTWSKKYIKKLENGRSLEGVYVPPRRQQLCLYELFPIIIKNEEGMEKAKEELLETLQIVAEREAYYLWKQYNPTGKGIDDANKKACCAIRGSFYDLEDIIKGNDLVHDEYTKYIDSKLNEIFGSSNKNDIDTKRARTDWWENETIDVANGTDHKTIRQLVWDAMQSGVRKAIDEENEKKKQNKNFPPCMGVEHIGIAKPQFIRWLEEWTNEFCEEYTKYFGAINSNCNRRKGADDCGDNSNIECKRACANYTNWLNPKRIEWNGMSNYYNKIYRKSNKESEDGKDYSMIMAPTVIDYLNKRCNGEINGNYICCSCKNIGENYNPSPAQKTKGSKKKDEQCEDNKGPLDLMNEVLNKMDEKYSAHKMKCTEFYLEHVEEQLKEIDNAIKDYKLYPLDRCFDDKSKMKVCDLIADAIGCKDKTKLDELDEWNDVDMRGTYNKHKGVLIPPRRRQLCFSRIVRGPANLRSLNEFKEEILKGAQSEGKFLGNYYNEDKGKEKKEDRKEKALEAMKNSFYDYEDIIKGTDMLTNIEFKDIKMKLDKLLTKETNNTKKAEDWWKTNKKSIWNAMLCGYKKSGNKIIDRSWCTIPTTETPPQFLRWIKEWGKNVCIQKEKYKQNVKSECSNVSNIDLDPQASESNNCTSEIRKYQELIRKRSIQWEAISERYRKYKGMDVLKNVKEPDANEYLKEHCSKCPCGFNDMEEISNNEDNEKETFNRIIEKVKIPAELEDVIYRLKHHKYNSNDYICNKYKNINVNMKKNNDNIWTDLLVKNSSDINKGVLIPPRRKNLFLNIEKSDICKYKKNPKLFNDFIYSSAISEVERLKKVYGEARAKVANAMKYSFADIGNIIKGDDMMKSPTSKYIEQIFKGTEYSGIDSETWWDMNKYHIWESMLCGYKQAGGDTKTNENCRFPDTDGVPQFLRWFQEWTEKFCDSRQKLYEKLNNDCKSVECNTSNGTIGNNCTIACQEYSNYISRKKDEYLSLKSHYDMNYRTSKKGITEAHEYLKEECRNNCECFLNHIDDKKKTWKNTYETLEETLKGKCECKKIEPKISPDISTEPEYPPSDPKPATPLPPQNDEPINSNILSSTIPLGIALALSSIAFLFLKKKPKSPVDLLRVLDIHKGDYGIPTPKSSNRYIPYVSDTYKGKTYIYMEGDTSGDDDKYAFMSDTTDITSSESEYEEMEINDIYVPGSPKYKTLIEVVLEPSKRDIQSDDIPNNDTPTNKFTDNEWNQLKKDFISNMLQNTQNTEPNILRDNVDNNTHPTMSRDNMEEKPFITSIHDRNLYSGEEYNYNINMVNNDDIPINRDNNVYSGIDLINDSLSGGEPIDIYDEVLKRKENELFGTNHVKQTSIHSVAKLTNSDPIHNQLELFHKWLDRHRDMDKWKNKDILHKLNEEWTIEHNEDLLDIPSSSHDDILKIKDETYNIISTNNLYSYENNDITPHQLGLPNIIPSGIIKHQNNGLRTNISMDIPFDEQNNNLENSNITYEDDEVQNS

SEQ ID NO: 57 - protein, 3073 aa, Plasmodium falciparum
MDSTSTIGDKIEEYLGAKSNDSKIDQSLKADPSKVQYYGSGGDGYYLKNNICKITVNHSDSGKYEPCDSIPPPYGDNDQWKCDENLFKASGNHKNICVPPRRQHMCIKNLENLKFDKIRDKHAFLADVLLTARNEGERIILYHPDTNSSNVCVALERSFADIADIIRGTDQWKGTNKFEPYLKQMFAKIREKDKVLQDKYQNDDENYKKLREDWWNANRQKVWEVITCGARSNDLLIKRRWRTSGKSNGENKLELCRKCGHYEKEVPTYLDYVPQFLRWLTEWIEDLYREEQNLIDDMERHREECTRKNVDSKEGTSYCNMCKEKHTKYCEFVNKWKSEWKNQENKYKDLYQQENKTSSSSKNTSRYDNYVKEFFEKLEANYKSLENYIKGDPYFAEYVTKLSFILNSSDANTSSGETANHNDEACNRNESEISSVEQAPISGPSSNKTCNTHSSIKANKKKECKDVKLGINNNDKDLKICVIEDTSLSGVDNCCCQDFLRMLQENCSDNKRGSSSNGSCDNKNQDECQTKLDEALASLTNGYKCEKCKSEQSKKNNNQWIWKKSRGTEGGLQEEYANTIALPPRTQSLCLVCLHEKEEKTQHKTISTNSELLKEWIIAAFHEGKNLKKRYHQNKNADNEKKKGENKKKLCKALKYSFADYGDLIKGTSIWDNEYTKDLELNLQQIFGKLFRKYIKKNISTEQDTLYSSLDELRESWWNTNKKYIWLAMKHGAEMNGTTCCGDGSSGENQTNSCDDIPTIDLIPQYLRFLQEWVEHFCKQRQENVNAVIENCKSCKECGGTCGSDCKTECEKKCKAYKEFIEKCEGQAAEGTSGYSWSKRWDQIYKRYSKYIEDAKRNRKAGTKNCGTSSGATSGVTTTENKCVQSDIDSFFKHLIDIGLTTPSSYLSIVLDDNICGADNAPWTTYTTYTTKNCDKEKDKSKSQSCDTAVVVNVPSPLGNTPHGYKYACQCKIPTTEESCDDRKEYMNQWIIDNTKNPKGSRSTNNDYELYTYNGVKETKLPKKLNSSKLDENDVTFFNLFEQWNKEIQYQIEQYMTNTKISCNNEKNVLSSSSEESKNQNGSDHHDGGNNNINQGTNCKEKCECYELWIKKIKEQWDKQKNNYNKFQSKQIYDARKSSQNKKEIVKLSHFLFFSCWEEYIQKYFNGDWSKIKNIGSDTFEFLIKKCGNNSGDGETIFSEKLKNAHIKCKENESTDTKINKSETSSKCNKTNYIRGCQSKRYDGKIFPGKGGEKQWICKDTITHGDTNGACIPPRTQNLCVGELWDKSYGGRSNIKNDTKELLKNKLKNAIQKETELLYEYHDKGTAIISQNDKKGQKGKNDPNGLPKGFCHAVQRSFIDYKNMILGTSVNTYEYIGKLQEDIKKIIEKGTTKQNGKTVGSGADKVNDWWKEIEKDMWGAVKSGIKTIKKQNNKCTYTGNECGVSPPTGNDEDQFVSWFKEWGEQFCIERLQYEQNIRDACTNNGKNEKKCINSKNNNEKEIQGDCKRKCEEYKKYISEKKQEWDKQKTKYENKYVGKSASDLLKENYPECISANFDFIFNDNIEYKTYYPYGDYSSICSCEQVKYYKYNNAEKKNNKSLCHEKGNDRTWSKKYIKKLENGRTLEGVYVPPRRQQLCLYELFPIIIKKEKDMEKAKELLETLQIVAEREAYYLWKQYNPTGKGIDDANKKAHKKACCAIRGSFYDLEDIIKGNDLVHDEYTKYIDSKLNEIFGSSNTNDIETKRARTDWWENETIGVANGTDSKTIRQLVWDAMQSGVIYAEEKKENFPPCMRVEHIGIAKPQFIRWLEEWTNEFCEKYTKYFEDMKSKCDPPKGADDCDDNSNIECKRACANYTNWLNPKRIEWNGMSNYYNKIYRKSNKESEDGKDYSMIMEPTVIDYLNKRCHGEINGNYICCSCKNIGENSTSGTVNKKLQKKETECEDNKGPLDLMNEVLNKMDKKYSAHKMKCTEVYLEHVEEQLKEIDNAIKDYKLYPLDRCFDDQTKMKVCDLIGDAIGCKDKTNLEELDEWNDMDLRDPYNKYKGVLIPPRRRQLCFSRIVRGRANLRNLNEFKEEILKGAQSEGKFLGNYYKEHKGNYYKEHKDKEKALEAMKNSFYDYEYIIKGTDMLANIQFKDIKIKLDKLLTKETNNNTKKAEDWWKVNNKSIWNAMLCGYKKSGNKIIDPSWCTIPTTEKTPQFLRWIKEWGTNVCIEKEKYKEYVKSKCSNVTNIDLDPQASESKNCTSEIRKYQEWSRNRYVQWEAISERYKKYKRMDEFKNTFKNIKEHDANEYLKEHCSKCPCGFNDMQEITKYTNIGNEAFKQIKEQVDIPAELEDVIYRLKHHKYNSNDYICRKYNNKNLYSRMQHNIDTIWTDLVKNSSDINKGVLIPPRRKNLFLNIEKSDICKYKKNPKLFNDFIYSSAFTEVERLKIVYGEAKTKVVHAMKYSFADIGNIIKGDDMMENNSSDKIGKILGDTDGQNEKRKAWWDMNKYHVWESMLCGYKQAGGDTETNENCRFPDTDGVPQFLRWFQEWTETFCVTRQELYDEVRTKCATAECTNGRINESECTQACDKYKSYVLSKKTEYEIQKKKYDTEFKNQNGSPKDASQYFKDKCNDNCDCISYHIDDKENWKYVYDTYDNKNLKAICDCPKPLPLFSDNTSDILQKTIPFGIALALGSIAFLFMKKKPKTPVDLLRVLDIHKGDYGIPTTKSSNRYIPYVSDTYKGKTYIYMEGEETDDYSYIRDISSSDITSSESEYEEVDINDIYVPSLPKYKTLIEVVLEPSKRDTFNTSSGDTFTNKLTDDEWNQLKQDFIEQYLQNIQKDFILHDSMDEKPFITQIQDRFLDSSHEEVTYNIDWNVPENINRITNNMDDPKYSSNNMYTGTDLINDSLNGNQYIDIYDEMLKRKENELFGTNNTKNTTFNSVSKQTPSDPIINQLDLYHNWMDKHRDICEQWKTKEDMLYKLNEVWNMERKEYLLDIQPSTLDDIHKINDETYNIISTNNIYDHPSQETPLQLLGSTNIIPSYITTEQNNGLRTNISMDTYIDETNNNNVVATSIIGDDQMENSYNC

SEQ ID NO: 58 - protein, 3283 aa, Plasmodium falciparum
MDKSSIGDKIEAYLEKKSDESDIEQSLKADPSEVEYYRSGGDGDYLRKNICKITVNHSDSGKYEPCDRKELSYGDIDEWKCQQNSSDGSEKPENICVPPRRQRMCIKNLENLKFDKIRDNNAFLADVLLTARNEGERIVQNHPDTNSSNVCVALERSFADLADIIRGTDQWKGTNKFEPCLKQMFAKIRENDKVLQDKYPNDDPKYTKLREDWWNANRQKVWEVITCGARSNDLLIKLGWTSSKESEGDNKLELCRKCGHYEEKVPTKLDYVPQFLRWLTEWIEDFYREKQNLIDGMERHREECTRKNVESKEGTSYCTNCKEKCKKYCEYVNKWKSEWENQKNKYNDLYQQENKTSSSSKKKSRYDDYVKEFFKNFKGDNYKSLENYIKGDPYFAEYATKLSFILNSSDTENASETPSKYYDEACNCNESEIASVGQAQTSGPSSNKTCITHSSIKTNKKKECKDVKLGINNNDKVLRVCVIEDTSLSGVDNCCCQDLLGILQENCSDNKRGSSSNGSCDKNSEEICQKKLEKVFASLTNGYKCDKCKSGTSRSKKKWIWKKSSGNEEGLQKEYANTIGLPPRTQSLCLVCLHEKEGKTQHKTISTNSELLKEWIIAAFHEGKNLKTSHEKKNDDNGKKLCKALEYSFADYGDLIKGTSIWDNEYTKDLELNLQKIFGKLFRKYIKKNNTAEQHTSYSSLDELRESWWNTNKKYIWTAMKHGAGMNGTTCSCSGDSSNDMPTIDLIPQYLRFLQEWVEHFCKQRQEKVNAVIENCNSCKESGGTCNSDCKTECKNKCEAYKEFIEDCKGGGTGTAGSPWSKRWDQIYKRYSKHIEDAKRNRKAGTKNCGTSSTTNAAASTDENKCVQSDVDSFFKHLIDIGLTTPSSYLSNVLDDNICGADKAPWTTYTTYTTTKNCDIQKKTPKSQSCDTLVVVNVPSPLGNTPHEYKYACECKIPTTEETCDDRKEYMNQWSCGSAQTVRGRSGKDDYELYTYNGVKETKPLGTLKNSKLDGNDVMFFNLFEQWNKEIQYQIEQYMTNTKISCNNEMKILSSSSEESQNQNGSDHHDGRNNNINQGTNCKKNCECYSLWIEKIKKQWDKQKDNYNKFQRKQIYDANKGPQNKKVVSLSHFLFFSCWEEYIQKYFNGDWSKIKNIGSDTFEFLIKKCGNDSGDGETIFNKKLNNANIKCNENASKDTKINKSETSSKCSEPIYIRGCQSKRYDGFISPGKGGEKQWICKDTIIHGDTNGACIPPRTQNLCVGELWDKRYGGRSNIKNDTKESLKNKLKNAIQKETELLYEYHDTGTAIISRNPMKEGGEDGKGKQKEGGEEANNNFNGLPKGFCHAVQRSFIDYKNMILGTSVSTYEYIGKLQEDIKKIIEQGRKPKDKTVGSGADKVNDWWKEIEKDMWGAVKCGIKTIKKQKKNGTFNGDECGVSPPTGNDEDQFVSWFKEWGEQFCIERLRYEQNIRDACINKDMEQNKCINSKNNNEKEIQGDCKRKCEKYKKYISEKKQEWDKQKTKYENKYVGKSASDLLKENYPECISANFDFIFNDNIEYKTYYPYGDYSSICSCEQVKYYKYIKDKGQNNKSLCHEKGNDRTWSKKYIKKLENGRTLEGVYVPPRRQQLCLYELFPIIIKKEKDMEKAKEELLETLQIVAEREAYYLWKQYHAHNDTTYLAHKKACCAIRGSFYDLEDIIKGNDLVHDEYTKYIDSKLNEIFGSSNKNDIETKRARTDWWENETIDVANGTDRKTIRQLVWDAMQSGVRKAIDEEKEKKKPNKNFPPCMGVEHIGIAKPQFIRWLEEWTNEFCEEYTKYFGAINSNCNLRKGADDCGDNSNIECKRACANYTNWLNPKRIEWNGMSNYYNKIYRKSNKESEDGKDYSMIMEPTVIDYLNKRCNGEINGNYICCSCKNIGENSTSPVANKKAQRKETECEEEKGPLDLMNEVLNKMDEKYSAHKMKCTEVYLEHVEEQLKEIDNAIKDYQLYPLDRCFDDQTKMKICDLIGDAIGCKHKINLDELDEWNDMDMRDPYNKYKGVLIPPRRRQLCFSRIVRGPANLRSLNEFKEEILKGAQSEGKFLGNYYKEHKDKEKALEAMKNSFYDYEYIIKGSDILENIEFKDIKRKLDKLLTKETNNNTKKAEDWWETNKKSIWNAILCGYKKSGNKIIDPSWCKIPTTETPPQFLRWIKEWGTYFCEEKEKQKNIVNIKCTDSDHIIGKSIKASEKLECKLATGNYEQWNTNRLKEWKLLSQQYKTNKESNKDIDMSELSAEQYLKKHCTGCSCRFSDMDELYIKTLKNENLHEEILKNAQIPIYFEEVYHRFDRSDVQCPDNNICNLYKSIPCKEMLNDEEVTAWTTHSVTDASKAIKIVLIPPRRRNLCLVINETQMKEFKTNKEMFKSFIYSSAASEVTRLKKVHNDNKDKVLQAMKYSFSDIGNIIKGDDMMKCSISDNISEILDEKNGSTKKRIIWWSQNKYHIWEAMLCAYQKDNKKIEFTSHDCKMPDTEKTPQFLRWLIEWSKQVCAHKLSKAKYVKENCSNYIKDKESDKEQCINASNIYIQWMNKQKEPWKILSNIYTNYKNEKNMNYPNLPRNASYYVREKCPECICNLEHLEEKENQNHQNGDHLIEEAINKAKMDLPDTEWGISWGPWKVNWENMFFISSFFPRIKIVSRDTAITNDISNVSHSKDPVAKDRSINDAMVDVVNIVTQPVTTVIDNVTPTLGRELNKVVNPINNILNEVTTSVQSSVTKVKETGNKITEDIKKIIDNMGNIMEGIIQSLEKTKEKEHKEFKSKQILDSKENTYPNTIVPTNMEDVLTMYHKIDIIAPAISVGIITLGYALYKSGLFGFIGSKRKGEDVIERIRLLKFAENKLGSSTSTYTYKKYSGEPVQEYMEMGSYKGQTYIYIEGDDTDEDYIENISSTDASSESEYDELDVSHIYPYRKPKYKTLIELILEPNNKNEDTYDTPSYQKDDNDKPTDDEWNQLKNDFILQFLVDEEPKDLNNHLPDKPSTDNPSDEIFMDDEKPFIISIQDRSLNNGESVTYYMNGNAQSNMDISTNNEYVTKITQNRSYSGMDLINCSLTRKSNVNIYGELLKRKEKELHAMEYNPIWLLPKFEPLSTQGQNNFQFININFIDKWLNQNREIINKLNKGDRLEYLKDLWMKEHNMNSITHLDSTTTFINGNTLRRNISMDQNSLSENNDPMDLNNNNPLNFIDYLEQSINERNDIFDDVIFYDTMEESQKDIPYSKDYTNSHKVKAPINLHSGNKSENGTLPV

SEQ ID NO: 59 - protein, 3091 aa, Plasmodium falciparum
MDKSSIGDKIEEYLKEKSNDSKIDQSLKADPSEVQYYRSGGDGYYLKNNICKITVNHSDSGTNDPCDRKELSYGDNDQWKCDENLYKASENNKNIFVPPRRQRMCIKNLEKLNVEKIRDKHAFLADVLLTARNEGERIVQNHPDTNSSNVCVALERSFADLADIIRGRDGNKCETKSTNNVEELIKKFFEKNYRENKEYKRKYRNDDPKYTKLREDWWTKNRQKVWEVITCSARSNDLLIKRRWRTSGKSNGENKLELCRKCGHYEKEVPTKLDYVPQFLRWLTEWIEDLYREKQNLIDGMERHREECTSEDDKSKEVTSYCNMCKDKCKKYCEYVNKWKSEWENQKNKYTELYEQNKNKTSQKNASRYDDYVKDFFKKLNEANYKSLDDYIKDDPYSKEYVTKLSFILNSSDANTSSGETANHNDEACNPNESEISSVGQAPISDPSSNKTCITHSSIKANKKKECKHVKLGVRENDKVLRVCVIEDTSLSGVDNCCCQDLLGMLQEPRIDKNQRGSSSNGSCDKNSEEICQKKLDEALASLTNGYKCDKCKSGTSTVNKNWIWKKYSGKEGGLQEEYANTIGLPPRTQSLCLVCLHEKEGKTQHKTISTNSELLKEWIIDAFHEGKNLKTSHQNKNSGNKENLCKDLKYSFADYGDLIKGTSIWDNEYTKDLELNLQKAFGKLFRKYIKKNNTAEQHTSYSSLDELRESWWNTNKKYIWLAMKHGAGMNGTTCCGDGSVTGSSDSGSTTCSGDNGSISCDDIPTIDLIPQYLRFLQEWVEHFCKQRQEKVKPVITNCNSCKNTSSKTKLGGTCNSDCEKKCKDECEKYKKFIEEFCTAAGGTSGSPWSKRWDQIYKRYSKYIEDAKRNRKAGTKNCGPSSTTSTAENKCVQSDIDSFFKHLIDIGLTTPSSYLSIVLDENNCGEDNAPWTTYTTYTTTKNCDIQKKTPKSQSCNTAVVVNVPSPLGNTPHGYKYACQCKIPTTEESCDDRKEYMNQWSSGSAQTVRGRSTNNDYELYTYNGVKETKLPKKLNSSKLDGNDVMFFNLFEQWNKEIQYQIEQYMTNANISCNNEMNVLSSSSEESKNQNGSDHPDGRNNNINQGTNCKEKCKCYELWIKKIKEQWGKQKDNYNKFEKKTSNDARKSSQNKKVVSLSHFLFFSCWEEYIQKYFNGDWSKIKNIGSDTFDFLIKKCGNDSAHGETIFNKKLNNANIKCNENESTNNKMKSSETSCDCSEPIYIRGCQSKTYDGKIFPGKGGEKQWICKDTITHGDTNGACIPPRTQNLCVGELWDKRYGGRSNIKNDTKESLKNKLKNAIQKETELLYEYHDKGTAIISQNDKKEKANNNNSNGLPKGFCHAVQRSFIDYKNMILGTSVNIYEHIGKLQEDIKKIIEQETTKQNGKTVGGADKVNAWWKGIEGEMWGAVRCAITKINKKKKNGTFSIDECGIFPPTGNDEDQSVSWFKEWGEQFCIERLQYEQNIREACTINGKNGKKCINSKSGQEDKIQGACKRKCEKYKKYISEKKQEWDKQKTKYENKYVGKSASDLLKENYPECISANFDFIFNDNIEYKTYYPYGDYSSICSCEQVKYYEYNNAEKKNNKSLCHEKGNDRTWSKKYIKKLENGRTLEGVYVPPRRQQLCLYELFPIIIKNEEGMEKAKEELLETLQIAAEREAYYLWKQYHAHNDTTYLAHKKACCAIRGSFYDLEDIIKGNDLVHDEYTKYIDSKLNKIFGSSNKNDIETKRARTDWWENEAIGVANGTDHKTIRQLVWDAMQSGVRYAVEEKKKKKQNENFPPCMGVEHIGIAKPQFIRWLEEWTNEFCEEYTKYFGAINSKCNLRKGADDCDDNSNIECKRACANYTNWLNPKRIEWNGMSNYYNKIYRKSNKESEDGKDYSMIMEPTVIDYLNKRCHGEINGNYICCSCKNIGENSTSPVANKKAQRKDEQCEDNKGPLDLMNEVLNKMDEKYSEHKMKCTEVYLEHVEEQLKEIDNAIKDYKLYPLDRCFDDQTKMKICDLIRDAIGCKDKTKLDELDEWNDMDLRDPYNKYKGVLIPPRRRQLCFSRIVRGRANLRSLNEFKEEILKGAQSEGKFLGNYYKEHKGNYYNEDKDKEKALEAMKNSFYDYEYIIKGSDILENIQFKDIKRKLDRLLEKETNNTKKVDDWWETNKKSIWNAMLCGYKKSGNKIIDPSWCTIPTTEKTPQFLRWIKEWGTNVCIQKEKYKQNVKSECSNVPNNNLGSQESESNNCTSEIRKYQEWSRKRSIQWEAISERYKKYKGMDEFKNTFKNIKEPDANTYLREHCSKCPCGFNDMKEIANDTENKQDIFNRIKEQVDIPAELEDVIYRLKHHKYNSNDYICNKYKNINVNKRHKNDDTFVTDNFVKKSWEINKGVLIPPRRKNLFLYIDPSKICEYKKNPKLFNDFIYSSAFTEVERLKIVYGEAKTKVAHAMKYSFADIGNIIKGDDMMENNSSDKIGKILGDTDGQNEKRKAWWDMNKYHIWESMLCGYREAGGYKETVEKLSEKKQKCTFPDIESVPQFLRWFQEWTENFCTKRKELYEDVQKICASAECNTSNGSVDKAECTKTCVNYKNYVLTKKTEYEIQKKKYDTEFKNQNSNDKDAPDYIKDKCNNNCDCISYHIDDKKNWKEPYETFDDDKFKGKCDCPKPLPLFSDNTSDILQKTIPFGIALALGSIAFLFMKKKPKTPVDLLRVLDIHKGDYGIPTTKSSNRYIPYVSDTYKGKTYIYMEGDTSGDDDKYIWDLSSSDITSSESEYEELDINDIYVPSLPKYKTLIEVVLEPSKRDTFNTSSGDTFTNKLTDDEWNQLKQDFIEQYLQNIQKDFILHDSVNEKPFITQIQDRFLDSSHEEVIYNIDWNVPENINRITNNMDDPKYSSNNLYTGTDLINDSLNGNQYIDIYDEMLKRKENELFGTYHTKYTTFNSVSKQTPSDPIINQLDLYHNWMDKHRDICEQWKTKEDMLYKLNEVWNMERKEYLLDIQPSTLDDIHKINDETYNIISTNNIYDHPSQETPLQLLGSTNIIPSYITTEQNNGLRTNISMDTYIDETNNNNVVATSIIGDDQMENSYNC

SEQ ID NO: 60 - protein, 3290 aa, Plasmodium falciparum
MDSKTTIGDKIEAYLEKKSNESDIDQSLKADPSEVEYYRSGGDGDYLRKNICKITVNHSDSGKYEPCDSIPPPYGDIDEWKCQQNSSDGSEKPENVFVPPRRQRMCIKNLENLNVERIRDNNAFLADVLLTARNEGERIVQNHPDTNSSNVCIALERSFADLADIIRGTDQWKGTNSNLEQNLKQMFKNILEKGSTIQSNYSKKDQNYTKLREDWWTKNRQKVWEVITCGARSNDLLIKRRWTTSKESEGENKLELCRKCGHYEGKVPTKLDYVPQFLRWLTEWIEDFYREKQNLIDGMERHREECTREDHKSKEGASYCSTCKDKCKKYCECVKKWKSEWENQKNKYKDLYQQENETSSSSKKKSRYDDYVKEFFKNFKGDNYKSLDDYIKGDPYSKEYTTKLSFILNPSDANTSSEKIQKNNDEACNCNESEIASVEQASISDRSSQKAYITHSSIKANKKKVCKHVKLGVRENDKVLRVCVIEDTSLSGVENCCFKDFLRIVEEPRIDKNQRGSSSNGSCNNNNEEACEKNLDEALASLTNCYKCDKCKSEQSKKNNNKWIWRKFPGNGEGLQKEYANTIGLPPRTQSLCLVCLHEKEGKTQELKNIRTNSELLKEWIIDAFHEGKNLKTSHQKKNAENKKKLCKALEYSFADYGDLIKGTSIWDNEYTKDLELNLQKIFGKLFRKYIKKNISTEQHTSYSSLDELRESWWNTNKKYIWTAMKHGAEMNSTMCNVDGSVTGSSDSGSTTCSGDNGSISCDDIPTIDLIPQYLRFLQEWVEHFCKQRQAKVNAVIKNCNSCKESGGTCNGDCKTKCKVACDAYKKFIEECRTAAEGTAGSSWVKRWYQIYMRYSKHIEDAKRNRKAGTKSCGTSTAESKCVQSDIDSFFKHLIDIGLTTPSSYLSNVLDENNCGADKAPWTTYTTYTTYTTYTTTKNCDIQKDKSKSQSCNTAVVVNVPSPLGNTPYEYKYACECKIPTTEETCDDRKEYMNQWISDNTKNPKGSGSTNNDYELYTYNGVQIKQAAGRSSSTKLDDKDVMFFNLFEQWNKEIQYQIEQYMTNTKISCIDEKEVLDSVSDEGTPKVRGGYEDGRNNNTDQGTNCKEKCECYKLWMEKIKKQWETQNQNYNKFEKKTSSYANKGPQNKKVVSLSHFLFFSCWEEYIQKYFNGDWSKIKNIGSDTFEYLIKKCGNDSGDGETIFNKKLKNAHIKCNENASKNTKINKSETSSDCSEPIYIRGCQSKTYDGFISPGKGGEKKWICKDTITHGDTNGACIPPRTQNLCVGELWDKSYGGRSNIKNDTKESLKNKLKNAIQKETELLYEYHDKGTAIISQNDKKEKANNNNSNGLPKGFCHAVQRSFIDYKNMILGTSVNIYEHIGKLQEDIKKIIEQERTKTKEKTVGSGADKVNDWWKEIEGEMWDAVRCGITKINKKNNNSIFNGNECGNSPSTGNDEDQSVSWFKEWGEQFCIERLQYEKNIREACTINGKNEKKCINSKSGQGDKIQGACKRKCEKYKKYISEKKQEWDKQKTKYENKYVGKSASDLLKENYPECISANFDFIFNDKADHKKYYPYGDYNSICSCEQVKYYEYNKDKGQSNKSLCHEKGNDRTWSKKYIKKLENGRTLEGVYVPPRRQQLCLYELFPIIIKKEKDMENVKKELLETLQIVAEREAYYLWKQYNPTGKGIDDANKKACCAIRGSFYDLEDIIKGNDLVHDEYTKYIDSKLNEIFGSSNKNDIETKRARTDWWENETITNRTDRKTIRQLVWDAMQSGVRYAVEEKNENFPPCMGVEHIGIAKPQFIRWLEEWTNEFCEEYTKYFEDMKSKCDLRKGADDCGDNTNIECKRACANYTNWLNPKRIEWNGMSNYYNKIYRKSNKESEDGKDYSMIMEPTVIDYLNKRCNGEINGNYICCSCKNIGENYNPSPAQKTKGSKKKDEQCEDNKGPLDLMNEVLNKMDPKYSKLNLKCTEVYLDHIEEQLKEIDNAIKDYKLYPLDRCFDDQTKMKICDLIGDAIGCKHKINLDELDEWNDVDMRGTYNKHKGVLIPPRRRQLCFSRIVRGPANLRNLNEFKEEILKGAQSEGKFLGNYYNEDKDKEKKEDRKEKALEAMKNSFYDYEYIIKGSDILENIEFKDIKRKLDKLLTKETNNTKKAEDWWKVNNKSIWNAMLCGYKKSGNKIIDPSWCKIPTTETPPQFLRWIKEWGTNVCIQKEKYKQNVKLECSNVSNIDLSLQALESKNCTSEIRKYQEWSRKRSIQWEAISERYRKYKGMDEFKNVKEPDANEYLKEHCSKCPCGFNDMKEIANDTENKQDIFKQIKEQVDIPAELEDVIYRLKHHKYNSNDYICNKYKNIHDRMKKNNDNIWTDLLVKKSWEISNGVLIPPRRKNLFLKIDQSDICKYKKDPKLFNDFIYWSAFTEVERLKIVYRQDKEKVVHAMKYSFADIGNIIKGDDMMKSPTSKYIEQIFKGTEYSGIDSETWWDMNKYHVWESMLCAYQKDNKKIEFTSHDCKMPDTEKTPQFLRWLIEWSKQVCAHKLSKAKYVKENCSNYIKDKESDKEQCINASNIYIQWMNKQKEPWKILSNIYTNYKNEKNMNYPNLPRNASYYVREKCPECICNLEHLEEKENQNHQNGDHLIEEAINKAKMDLPDTKWGISWGPWKVNWENMFFISSFFPRIKIVSRDTAITNDISNVSHSKDPVAKDRSINDAMVDVVNIVTQPVTTVIDNVTPTLGRELNKVVNPINNILNEVTTSVQSSVTKVKETGNKITEDIKKIIDNMGNIMEGIIQSLEKTKEKEHKEFKSKQILDSKENTYPNTIVPTNMEDVLTMYHKIDIIAPAISVGIITLGYALYKSGLFGFIGSKHKGEDVIERIRLLKFAENKLGSSTSTYTYKKYSGEPVQEYMEMGSYKGQTYIYIEGDDTDEDYIENISSTDASSESEYDELDVSHIYPYRKPKYKTLIELILEPNNKNEDTYDTPSYQKDDNDKPTDDEWNQLKNDFILQFLVDEEPKDLNKHLPDKPSTDNPSDEIFMDDEKPFIISIQDRSLNNGESVTYYMNGNAQSNMDISTNNEYVTKITQNRSYSGMDLINCSLTRKSNVNIYGELLKRKEKELHAMEYNPIWLLPKFEPLSTQGQNNFQFININFIDKWLNQNREIINKLNKGDRLEYLKDLWMKEHNMNSITHLDSTTTFINGNTLRRNISMDQNSLSENNDPMDLNNNNPLNFIDYLEQSINERNDIFDDVIFYDTMEESQKDIPYSKDYTNSHKVKAPINLHSGNKSENGTLPV

SEQ ID NO: 61 - protein, 3151 aa, Plasmodium falciparum
MDSTSTIANKIEEYLKEKSNESDIDQSLKADPSEVEYYRSGGDGDYLRKNICKITVNHSDSGKYDPCDRKELSYGDNDQWKCDENLSKVSEKPENICVPPRRQRMCIKNLENLNVERIRDKHAFLADVLLTARNEGERIVQNHPDTNSSNVCIALERSFADLADIIRGTDQWKGTNSNLEKNLKQMFAKIRENDKVLQDKYPNDDPKYTKLREGWWNANRQKVWEVITCSARSNDLLIKRRWTTSKESEGENKLELCRKCGHYEGKVPTYLDYVPQFLRWLTEWIEDFYREKQNLIDGMERHREECTREDDKCKEGASYCSTCKDKCKKYCECVKKWKSEWENQKNKYTELYEQNKNKTSQKNTSRYDNYVKDFFEKLEANYKSLDDYIKDDPYFAEYATKLSFILNSSDANNPSGETANHNDEVCNPNESEISSVGQAQTSGPSSNKTCITHSSIKTNKKKVCKYVKLGVRENDKDLKICVIEDTSLSGVDNCCCQDLLGILQENCSDNKRGSSSNGSCNNNNEEACEKNLEKVLASLTNGYKNQKCKSEQSKKNNNKWIWKKSSGNGEGLQKEYANTIGLPPRTQSLYLGNLRKLGNVCEDVKDINFDTKEKFLAGCLIAAFHEGKNLKTTYLEKKKGDNGKKLCKDLKYSFADYGDLIKGTSIWDNDFTKNVELNLQQIFGKLFRKYIKKNNTAEQDTSYSSLDELRESWWNTNKKYIWLAMKHGAGMNGTTCSSGSGDNGDSSITGSSDSGSTTCSGDNGSISCDDIPTIDFIPQYLRFLQEWVENFCEQRQAKVNAVINSCNSCKNTSGERKIGDTCNSDCKTECKNKCEAYKTFIDNVGDGTAGSPWVKRWDQIYKRYSKHIEDAKRNRKAGTKNCGITTGTISGESSGATSGVTTTENKCVQSDIDSFFKHLIDIGLTTPSSYLSIVLDENNCGEDKAPWTTYTTYTTYTTYTTTKNCDIQKDKSKLQQSNTAVVVNVPSPLGNTPHEYKYACQCKIPTTEETCDDRKEYMNQWIIDNTKNPKGSRSTNNDYELYTYNGVKETKPLGTLKSSKLDDKDVMFFNLFEQWNKEIQYEIEQYMTNTKISCNNEMKVLSSSSEESQNQNGSDHHDGRNNNINQGTNCKKNCECYSLWMEKIKKQWGKQKNNYNKFQRKQIYDGNNASHKKEIVKLSNFLFFSCWEEYIQKYFNGDWSKIKNIGSDTFEYLIKKCGNDSGDGETIFNKKLKNAHIKCNENESTDTKINKSETSSDCSEPIYIRGCQSKTYDGFISPGKGGEKKWICKDTITHGDTNGACIPPRTQNLCVGELWDKRYGGRSNIKNDTKESLKNKLKNAIQKETELLYEYHDKGTAIISQNDKKEKANNNNSNGLPKGFCHAVQRSFIDYKNMILGTSVNTYEYIGKLQEDIKKIIEQGRKPKEKRVGSGADKVNDWWKEIEKDMWGAVKCGIKTIKKQKKNGTFSIDECGVSPPTGNDEDQFVSWFKEWGEQFCIERLQYEKNIREACTINGKNEKKCINSKSGQEDKIQGACKRKCEKYKKYISEKKQEWDKQKTKYENKYVGKSASDLLKENYPECISANFDFIFNDKADHKKYYPYGDYNSICSCEQVKYYEYNKDKGQNNKSLCHEKGNDRTWSKKYIKKLENGRSLEGVYVPPRRQQLCLYELFPIIIKKEKDMEKAKEELLETLKIVAEREAYYLWKQYHAHNDTTYLAHKKACCAIRGSFYDLEDIIKGNDLVHDEYTKYIDSKLNEIFGSSNTNNIDTKRARTDWWENETITNGPDRKTIRQLVWDAMQSGVRYAVEEKKENFPPCMGVEHIGIAKPQFIRWLEEWTNEFCEEYTKYFEDMKSKCDPPKSADDCGDNTNIECKKACANYTNWLNPKRIEWNGMSNYYNKIYRKSNKESEDGKDYSMIMEPTVIDYLNKRCNGEINGNYICCSCKNIGAYNTTSGTVNKKLQKKETECEDNKGPLDLMNEVLNKMDEKYSAHKMKCTEVYLDHVEEQLKEIDNAIKDYKLYPLDRCFDDQTKMKVCDLIGDAIGCKDKTKLDELDEWNDVDMRDPYNKYKGVLIPPRRRQLCFSRIVRGPANLRNLNEFKEEILKGAQSEGKFLGNYYKEHKDKEKALEAMKNSFYDYEYIIKGSDMLTNIEFKDIKRKLDKLLTKETNNTKKVDDWWETNKKSIWNAMLCGYKKSGNKIIDPSWCTIPTTETPPQFLRWVKEWGTNVCIQKEKYKQNVKSKCSNVPNNNLGSQESESKNCTSEIRKYQEWSRKRSIQWEAISERYKKYKRMDEFKNVKEPDANEYLKEHCSKCPCGYNDMEEIANDTENKQDIFKQIIEKVKIPAELEDVIYRLKHHKYNSNDYICNKYKNINVNKRHKNDDTWTDLLVKNSSDINKGVLIPPRRKNLFLNIEKSDICKYKKDPKLFNDFIYSSAISEVERLKIVYGEARAKVVHAMKYSFADIGNIIKGDDMMDKDTSDKIGKILGGDGVGQNEKRKKWWDSNKYHIWESMLCAYKKAYRNISDVDKKMLDIPNNDNEHQFLRWFTEWGEDFCKQRGIKEEELVKGCKDCGVDVHGKSCNGKCGECKTQCEEYKKWIETWKENYKKQNEVYNEVKKTEQYNKDSDVKASDDARVYLDTQLKNMMCTNESTYKNCDYTCMNESSSTARGDSMPKTLDDVPEKVKDKCTCIPDECNALSVTNSGFPDGSAFGGGVSYGKCKGLEGGPPKKVENPPSDYTSDILTSTIPVGIALALGSIAFLFIKKKPKTPVDLLRVLDIHKGDYGIPTLKSSNRYIPYVSDTYKGKTYIYMEGDTSGDDDKYIWDLSSSDITSSESEYEELDINDIYVPSLPKYKTLIEVVLEPSKRDTFNTPSGDTFTNKLTDDEWNQLKQDFIEQYLQNIQKDFILHDSVNEKPFITQIQDRFLDSSHEEVIYNIDWNVPENINRITNIMDDPKYSSNNMYTGTDLINDSLNGNQHMDIYDEMLKRKENELFGTNNTKNTTFNSVYKQTHSDPIINQLNLYHKWLDKHRDICEQWKTKKDMLYKLNEVWNMERKEYLLDIPPSILDDIHKTNDETYNIISTNNIYDHPSQETPLQLLGSTNIIPSYITTEQNNGLRTNISMDIHIDEKNYNNVVATSIIGDDQMENSYNC

SEQ ID NO: 62 - protein, 3113 aa, Plasmodium falciparum
MDKSSIGDKIEAYLEKKSNESDIDQSLKADPSEVQYYGSGGDGYYLKNNICKITVNHSDSGTNDPCDRKELSYGDIDEWKCQQNSSDGSGKPENICVPPRRQRMCINNLEKLKFDKIRDKHAFLADVLLTARNEGERIVQNHPDTNSSNVCVALERSFADIADIIRGTDLWKGTNSNLEQNLKQMFAKILEKDKVLQDKYPKDQNYTKLREAWWNANRQKVWEVITCSARSNDLLIKRRWTTSGKSNGDNKLELCRKCGHYEEKVPTYLDYVPQFLRWLTEWIADLYREKQNLIDGMERHREECTREDHKSKEGTSYCNMCKDKCKKYCECVKKWKSEWENQKNKYKDLYEQNKNKTSQKNTSRYDDYVKEFFKKLEANYKSLDDYIKDDPYSKEYVTKLSFIPNSSDTENASEKIQKNNDEVCNPNESGISSVGQAQTSGTSSNKTCITHSSIKTNKKKVCKHVKLGINNNDKVLRVCVIEDDSLRGVDNCCCQDFLRMLQENCSDNKRGSSSNDSCNNKNQEACEKNLDEALASLTNGYKCDKCKSGTSTVNKNWIWRKSSGNKEGLQKEYANTIGLPPRTQSLCLVCLHEKEGKTQELKNISTNSELLKEWIIAAFHEGKNLKTTYPQNKNAENKKKLCKALKYSFADYGDLIKGTSIWDNEYTKDLELNLQKIFGKLFRKYIKKNNTAEQHTSYSSLDELRESWWNTNKKYIWTAMKHGAGMNGTTCSSGSGDNGSISCDDIPTIDLIPQYLRFLQEWVEHFCEQRQGKVKDVITNCKSCKESGDTCKTECKTKCKDECEKYKTFIEDCNGGGTGTAGSSWSKRWDQIYKRYSKYIEDAKRNRKAGTKNCGPSSTTSTAESKCVQSDIDSFFKHLIDIGLTTPSSYLSIVLDDNICGADKAPWTTYTTYTTTENCDIQKKTPKSQSCNTAVVVNVPSPLGNTPHGYKYACECKIPTTEESCDDRKEYMNQWISDTSKKQKGSGSGKDDYELYTYNGVKETKLPKKLNSTKLDDKDVMFFNLFEQWNKEIQYQIEQYMTNANISCNNEMNVLSSSSEESQNQKGSDHHVGRNNNTDQGTNCREKCECYSLWIEKIKKQWGKQKDNYNKFQRKQIYDGNNASHKKEIVKLSNFLFFSCWEEYIQKYFNGDWSKIKNIGSDTFEFLIKKCGNDSAHGETIFSEKLKNAQQQCKEIQNTDTNINKSGKSCDLNATNYIRGCQSKTYDGKIFPGKGGEKQWICKDTIIHGDTNGACIPPRTQNLCVGNLWDKSYGGRSNIKNDTKESLKNKLKNAIQKETELLYEYHDKGTAIISQNDKKGEKGKNDPNGLPKGFCHAVQRSFIDYKNMILGTSVNIYEYIGKLQEDIKKIIEQERTKTKEKRVGSGAENVNAWWKEIEKDMWGAVKCGIKTIKKQKKNGTFNGDECGVSPPTGNDEDQFVSWFKEWGEQFCIERLRYEQNIREACTINGKNGKKCINSKSGQGDKIQGDCKRKCEKYKKYISEKKQEWDKQKTKYENKYVGKSASDLLKENYPECISANFDFIFNDNIEYKTYYPYGDYNSICSCEQVKYYKYNNAEKKNNKSLCHEKGNDRTWSKKYIKKLENGRSLEGVYVPPRRQQLCLYELFPIIIKKEKDMENVKKELLETLQIVAEREAYYLWKQYNPTGKGIDDANKKACCAIRGSFYDLEDIIKGNDLVHDEYTKYIDSKLNEIFGSSNKNDIDTKRARTDWWENETFQVSNITGANKSDPKTIRQLVWDAMQSGVRYAVEEKNENFPPCMGVEHIGIAKPQFIRWLEEWTNEFCEKYTKYFEDMKSNCNRRKGADTCGDNSNIECKRACANYTNWLNPKRIEWNGMSNYYNKIYRKSNKESEDGKDYSMIMEPTVIDYLNKRCHGEINGNYICCSCKNIGEYNSTSGTVNKKLQKKETECEEEKGPLDLMNEVLNKMDEKYSAHKMKCTEVYLEHVEEQLKEIDNAIKDYQLYPLDRCFDDQTKMKVCNLIGDAIGCKDKTKLDELDEWNDMDLRDPYNKYKGVLIPPRRRQLCFSRIVRGPANLRNLNEFKEEILKGALSEGKFLGNYYKEHKDKEKALEAMKNSFYDYEDIIKGSDMLANIKFKDIKIKLDKLLTKETNNTKKAEDWWETNKKSIWNAMLCGYKKSGNKIIDPSWCKIITTEKTPQFLRWIKEWGTNVCIQKEKYKKNVKSKCSNVPNNNLGSQESESKNCTSEIRKYQEWSRKRSIQWEAISEGYKKYKGKDEFKNVKEPDANTYLKEHCSKCPCGFNDMEEIANDTENKQDIFKQIKEQVDIPDELEDVIYRIKNRKYNSNDYICNKYKNINVNKRHKNDDTWTDLLVKNSSDINKGVLIPPRRKNLFLNIEKSDICKYKKDPKLFNDFIYSSAISEVERLKIVYGEARAKVVHAMKYSFADIGNIIKGDDMMDKDTSDKIGKILGGDGVGQNEKRKKWWDSNKYHIWESMLCAYKKAYRNISDVDKKMLDIPNNDNEHQFLRWFTEWGEDFCKQRGIKEEELVKGCKDCGVDVHGKSCNGKCGECKTQCEEYKKWIETWKENYKKQNEVYNEVKKTEQYNKDSDVKASDDARVYLDTQLKNMMCTNESTYKNCDYTCMNESSSTARGDSMPKTLDDVPEKVKDKCICIPDECNALSVTNSGFPDGSAFGGGVSYGKCKGLEGGPPKKVENPPSDYTSDILTSTIPVGIALALGSIAFLFIKKKPKTPVDLLRVLDIHKGDYGIPTLKSSNRYIPYVSDTYKGKTYIYMEGDTSGDDDKYIWDLSSSDITSSESEYEELDINDIYVPSLPKYKTLIEVVLEPSKRDTFNTPSGDTFTNKLTDDEWNQLKQDFIEQYLQNIQKDFILHDSVNEKPFITQIQDRFLDSSHEEVIYNIDWNVPENINRINNIMHDTKYCSNNLYTGTDLINDSLNGNQYIDIYDEMLKRKENELFGTYHTKYTTFNSVSKQTPSDPIINQLDLYHNWMDKHRDICEQWKTKEDMLYKLNEVWNMERKEYLLDIQPSTLDDIHKINDETYNIISTNNIYDHPSQETPLQLLGSTNIIPSYITTEQNNGLRTNISMDTYIDETNNNNVVATSIIGDDQMENSYNC

SEQ ID NO: 63 - protein, 3083 aa, Plasmodium falciparum
MDKSSIANKIEEYLKEKSDDSKIDQSLKADPSEVQYYGSGGDGYYLKNNICKITVNHSDSGTNDPCEKKLLPYGDNDQWKCDENLSKVSGKPENICVPPRRQRMCINNLEKLKFDKIRDKHAFLADVLLTARNEGEKIVQNHPDTNSSNVCVALERSFADLADIIRGRDGNKCETKSPNNVEELIKKFFEKNYRSNEEYRKKYPNDDENYKKLREAWWNANRQKVWEVITCSARSNDLLIKRRWRTSKESNGENKLELCRKCGHYEKEVPTKLDYVPQFLRWLTEWIEDFYREKQNLIDDMERHREECTREDDKCKEGTSYCNMCKEKHTKYCECVKKWKTEWENQENKYTELYEQNKNKTSQKNTSRYDDNVKEFFEKLKGNGYSSANSYVKNNPYSSEDGKLLKFDNTNAFKESITCNKNVCSCSGNEKLIISEGSLSSSSFGTSSSYQSSIITSKKRNECAQIKFSGNENNMNIKICSTQDNNLLVKLEDLLKGFCDTCDTGIGVEVVSENNCEEQYKKLLPSLEKCTVLNCNECNKTVFKNLKKQQEKWIWGKPKQEAAGLQEEYANTIGLPPRTQLLYLVCLHEKEGKTQELKNISTNSELLKEWIIAAFHEGKNLKPSHQNKNDDNGKKLCKDLKYSFADYGDLIKGTSIWDNDFTKDLELNLQKIFGKLFRKYIKKNISTEQDTLYSSLDELRESWWNTNKKYIWLAMKHGAGMNSTTCNGDGSVTGSSDSGSTTCSGDNGSISCDDIPTIDLIPQYLRFLQEWVEHFCKQRQEKVNAVITNCKSCKNTSGERKIGDTCGNDCEKKCKVACDAYKEFIEECRTAAEGTAGSSWVKRWDQIYKRYSKYIEDAKRNRKAGTKNCGPSSTTNAAESKCVQSDIDSFFKHLIDIGLTTPSSYLSIVLDENNCGEDNAPWTTYTTYTTTKNCDIQKDKSKSQSCNTAVVVNVPSPLGNTPHGYKYACECRTPNKQETCDDRKEYMNQWIIDNTKNPKGSGSGKDYYELCKYNGVKETKLPKKLNSSKLDDKDVMFFNLFEQWNKEIQYQIEQYMTYANISCNNEMNVLSSSSEESQNQNGSDHHDGRNNNTDQGTNCREKCKCYSLWIEKIKKQWGKQKNNYNKFEKKTSSYANKGPQNKKVVSLSHFLFFSCWEEYIQKYFNGDWSKIKNIGSDTFEFLIKKCGNDSAHGETIFSEKLNNAHIKCNENASKNTKINPSVISSDCSEPIYIRGCQSKTYDGFISPGKGGEKQWICKDTITHGDTNGACIPPRTQNLCVGNLWDKSYGGRSNIKNDTKESLKNKLKNAIQKETELLYEYHDKGTATISRNPMKEGGEDGKGKQKEGGEKANNNNSNGLPKGFCHAVQRSFIDYKNMILGTSVNIYEYIGKLQEDIKKIIEQETPQQNGKTVGSGADKVNDWWKEIEKDMWGAVKCGITKINKKQKKNGTYTGDECGVSPPTGNDEDQFVSWFKEWGEQFCIERLQYEKNIRDACTNNGQGDKIQGACKRKCEKYKKYISEKKKEWDKQKTKYENKYVGKSASDLLKENYPECISANFDFIFNDNIEYKTYYPYGDYSSICSCEQVKYYKYNKDKGQNNKSLCHEKGNDRTWSKKYIKKLENGRSLEGVYVPPGRQQLCLYELFPIIIKNEEGMEKAKKELLETLQIVAEREAYYLWKQYHAHNDTTYLAHKKACCAIRGSFYDLEDIIKGNDLVHDEYTKYIDSKLNKIFGSSNTNNIETKRARTDWWENKTIDVPNITDANKSDSKTIRQLVWDAMQSGVRKAIDEENEKKKPNENFPPCMGVEHIGIAKPQFIRWLEEWTNEFCEKYTKYFEDMKSNCDPPKSADDCGDNTNIECKKACANYTNWLNPKRIEWNGMSNYYNKIYRKSNKESEDGKDYSMIMEPTVIDYLNKRCHGEINGNYICCSCKNIGAYNTTSGTVNKKLQKKETECEDNKGPLDLMNEVLNKMDPKYSKLNLKCTEVYLEHVEEQLKEIDNAIKDYKLYPLDRCFDDQTKMKICDLIGDAIGCKDKTKLDELDEWNDVDMRDPYNKHKGVLIPPRRRQLCFSRIVRGRANLRNLNEFKEEILKGAQSEGKFLGNYYKEHKGNYYKEHKDKEKALEAMKNSFYDYEYIIKGSDILENIQFKDIKRKLDKLLEKETNNNIQNAEDWWKVNNKSIWNAMLCGYKKSGNKIIDPSWCTIPTTEKTPQFLRWIKEWGTNVCIQKQEHKEYVKSKCSNVTNNNLGSQESESKNCTSEIRKYQEWSRKRSIQWEAISERYKKYKGMDILKDVKEPDANTYLKEHCSKCPCGFNDMKEISNNEDNEKETFNRIIEKVKIPAELEDVIYRLKHHKYNSNDYICNKYKNINVNMKKNNDNIWTDLVKNSWDINKGVLIPPRRKNLFLKIDESDICKYKKNPKLFKDFIYSSAFTEVERLKNAYGEAKTKVANAMKYSFADIGNIIKGDDMMENNSSDNIGKILGGDGDRKNEKRKKWWDMNKYHVWESMLCGYKQAGGDTKTNENCRFPDTEAVPQFLRWFQEWTENFCIRRDELYKKIDTNCTSATCNKEDGSVDKKECTEACEKYQNYVLSKKTEYEIQKKKYDTEFKNKNSNDKDAPDYIKDKCNNNCDCISYHIDDKKNWKEPYDTFDDDKFKGKCDCPKPLPLFSDNTSDILQKTIPFGIALALGSIAFLFMKKKPKTPVDLLRVLDIHKGDYGIPTTKSSNRYIPYVSDTYKGKTYIYMEGDTSGDDDKYIWDLSSSDITSSESEYEELDINDIYVPSLPKYKTLIEVVLEPSKRDTFNTSSGDTFTNKLTDDEWNQLKQDFIEQYLQNIQKDFILHDSVNEKPFITQIQDRFLDSSHEEVIYNIDWNVPENINRINNIMHDTKYCSNNLYTGTDLINDSLNGNQHMDIYDEMLKRKENELFGTNNTKNTTFNSVYKQTHSDPIINQLNLYHKWLDKHRDICEQCKTKKDMLYKLNEVWNMERKEYLLDIPPSILDDIHKTNDETYNIISTNNIYDHPSQETPLQLLGSTNIIPSYITTEQNNGLRTNISMDIHIDEKNYNNVVATSIIGDDQMENSYNC

SEQ ID NO: 64 - protein, 3105 aa, Plasmodium falciparum
MDSTSTIADKIEEYLEKKSDESNIEQSLKADPSEVQYYGSGGDGYYLKNNICKITVNHSDSGKYEPCDRIPPPYGDNDQWKCQQNSSDGSGNHKNICVPPRRQRMCINNLEKLNVDKIRDKHAFLADVLLTARNEGERIVQNHPDTNSSNVCVALERSFADLADIIRGRDENKCETKSTNNVEELIKNFFGKNYRSNEEYKRKYRNDDPKYTKLRESWWTKNRQKVWEVITCGARSNDLLIKRGWRTSKESEGENKLELFRKCGHYEEKVPTKLDYVPQFLRWLTEWIEDLYREKQNLIDDMERHREECTSEDDKCKEVTSYCSTCKDKCKKYCEFVKKWKSEWKNQKNKYTELYEQNKNKTSSSSKNTSRYDDYVKEFFKKLNEANYKSLDDYIKGDPYSAEYVTKLSFILNPSDANNPSGETANHNDEVCNCNESEIACVELAQTSGSSSNKTCITHSSIKANKKKVCKDVKLGINNNDKDLKICVIEDTSLSGVENCCCQDFLRMLQENCSDNKSGSSSNGSCNNNNEDECQKKLEKVFASLTNGYKCDKCKSEQSKKNNNIWIWRKSSGDEKGLQKEYANTIGLPPRTQSLYLGNLPKLENVCEDVTDINFDTKEKFLAGCLIAAFHEGKNLKKRYHQNKNDENKKKLCKALKYSFADYGDLIKGTSIWDNEYTKDLELNLQKIFGKLFRKYIKKNISTEQDTLYSSLDELRESWWNTNKKYIWLAMKHGTTCSSGSGDNGDGSVTGSSDSGSTTCCGDGSVTGSGSSCDDIPTIDLIPQYLRFLQEWVEHFCKQRQEKVNAVINSCNSCKNTSSKTKLGDTCKTECKNKCEAYKNFIEDCKGGDGTAGSSWVKRWYQIYMRYSKYIEDAKRNRKAGTKSCGTSSGATSGVTTTENKCVQSDIDSFFKHLIDIGLTTPSSYLSIVLDDNICGADKAPWTTYTTYTTKNCDKDKKKSKSQSCDTLVVVNVPSPLGNTPHGYKYVCECRTPSNKELCDDRKEYMNQWISDTSKNPKGGRSTNNDYELYTYNGVDVKPTTVRSNSTKLDDKDVMFFNLFEQWNKEIQYQIEQYMTNTKISCNNEMKVLSRVSEESKNQNSSDDHDGGNNNTDQGTNCKEKCECYKLWIEKIKEQWDKQKKNYNKFEKKTSNDARKSSQNKKVVSLSHFLFFSCWEEYIQKYFNGDWSKIKNIGSDTFEFLIKKCGNNSGDGETIFSEKLNNANIKCNENESTDTKINKSETSCDLNATNYIRGCQSKTYDGKIFPGKGGEKQWICKDTIIHGDTNGACIPPRTQNLCVGELWDKRYGGRSNIKNDTKESLKNKLKNAIQKETELLYEYHDKGTATISRNPMKEGGEDGKGKQKEGGEKANNNKNSNGLPKGFCHAVQRSFIDYKNMILGTSVNIYEYIGKLQEDIKKIIEKGTTKQNGKTVGSGADKVNDWWKEIEKDMWGAVKCGIKTIKKQNNKCTYTGDECGIFPPTGNDEDQFVSWFKEWGEQFCIERLQYEQNIRDACINNGKNEKKCINSKSGQGDKVEGACKRKCEEYKKYISEKKKEWDKQKTKYENKYVGKSASDLLKENYPECISANFDFIFNDNIEYKTYYPYGDYSSICSCEQVKYYEYIKDKGQNNKSLCHEKGNDRTWSKKYIKKLENGRTLEGVYVPPRRQQLCLYELFPIIIKKENDITNAKKELLETLQIVAEREAYYLWKQYNPTGKGIDDANKKAHKKACCAIRGSFYDLEDIIKGNDLVHDEYTKYIDSKLNKIFGSSNTNNIDTKRARTDWWENEIITNGTDSKTIRQLVWDAMQSGVRYAVEEKNENFPPCMGVEHIGIAKPQFIRWLEEWTNEFCEKYTKYFEDMKSKCDPPKSADDCGDNSNIECKRACANYTNWLNPKRIEWNGMSNYYNKIYRKSNKESEDGKDYSMIMEPTVIDYLNKRCNGEINGNYICCSCKNIGENSTSPAQKTKGSKKKDEQCEDNKGPLDLMNEVLNKMDEKYSEHKMKCTEVYLEHVEEQLKEIDNAIKDYKLYPLDRCFDDQTKMKICDLIGDAIGCKDKTKLDELDEWNDVDMRDPYNKHKGVLIPPRRRQLCFSRIVRGPANLRNLNEFKEEILKGAQSEGKFLGNYYKEKKDKEKKEHKDKEKALEAMKNSFYDYEYIIKGTDILENIQFKDIKRKLDKLLTKETNNNIQNAEDWWKVNNKSIWNAMLCGYKKSGNKIIDPSWCTIPTTEKTPQFLRWIKEWGTNVCIQKQEHKEYVKSKCSNVTNIDLDPQASESKNCTSEIRKYQEWSRKRSIQWEAISERYKRMDILKDVKESDANEYLKEHCSKCPCGFNDMKEIANDTENKQDIFKQIKEQVDIPAELEDVIYRLKHRKYNSNDYFCRKYNNKNLYSRMQHNIDTIWTDLLVKNSWEINKGVLIPPRRKNLFLNIEKSDICEYKKDPKLFKDFIYSSAFTEVERLKKVYGGARAKVVHAMKYSFADIGNIIKGDDMMENNSSDKIGKILGGDGDRKNEKRKAWWDMNKYHIWESMLCGYKQAGGDTETNENCRFPDTDGVPQFLRWFQEWIESFCSHRKKLYEELNSACTSAECDTTNGTIGNNCTIACQEYSNYISSKKEEYQSLKSYYDVNYKETKGKNKEAHEFFKNKCNDNKCECLNKHIDDKKNWKEPYETLDNMKLKGICDCPKPLPLFSDNTSDILQKTIPVGIALALGSIAFFFMKKKPKTPVDLLRVLDIHKGDYGIPTTKSSNRYIPYVSDTYKGKTYIYMEGEETDDYSYIRDISSSDITSSSESEYEELDINDIYVPSLPKYKTLIEVVLEPSKRDTFNTPSGDTFTNKLTDDEWNQLKQDFIEQYLQNIQKDFILHDSVNEKPFITQIQDRFLDSSHEEVIYNIDWNVPENINRITNNMDDPKYSSNNMYTGTDLINDSLNGNQYIDIYDEMLKRKENELFGTYHTKYTTFNSVSKQTPSDPIINQLDLYHNWMDKHRDICEQWKTKEDMLYKLNEVWNMERKEYLLDIQPSTLDDIHKINDETYNIISTNNIYDHPSQETPLQLLGSTNIIPSYITTEQNNGLRTNISMDTYIDETNNNNVVATSIIGDDQMENSYNC

SEQ ID NO: 65 - protein, 3075 aa, Plasmodium falciparum
MDSTSTIGDKIEEYLGAKSNESNIDQSLKADPSKVQYYRSGGDGYYLKNNICKITVNHSDSGTNDPCDRKELSYGDNDQWKCQQNSSDGSENNKNIFVPPRRQRMCINNLENLKFERIRDKHAFLADVLLTARNEGEKIVQNHPDTNSSNVCVALERSFADLADIIRGTDQWKGTNSNLEQNLKQMFKKILEKDSTLKNNYSNDDENYKKLREAWWNANRQKVWEVITCGARSNDLLIKRRWTTSKESNGENKLELCRKCGHYEEKVPTKLDYVPQFLRWLTEWIEDLYREEQNLIDDMERHREECTSEDDKSNEGTSYCTNCKEKHTKYCECVKKWKTEWENQKNKYNDLYQQKKNETSSSSKKKSRYDDYVKDFFKKLKGNVYSSANSYVKNDPYSKEYVTKLSFILNPSDANTSSGETANHNDEVCNCNESGIACVGQAQISDRLSQKACNTHSSIKTNKKKECKHVKLGVRENDKVLKICVIEHTSLSGVENCCCQDFLRILQENCSDNIRGSSSNGSCNNKNQDECEKNLDEALASLTNCYKCEKCKSEQSKKNNKNWIWKKYSVKEEGLQKEYANTIGLPPRTQSLYLGNLRKLENVCKDVTDINFDTKEKFLAGCLIAAFHEGKNLKTTYLEKKNDDNGKKLCKALKYSFADYGDLIKGTSIWDNDFTKDLELNLQKAFGKLFRKYIKKNNTAEQDTSYSSLDELRESWWNTNKKYIWTAMKHGTTCSSGSGDNGSISCDDMPTIDLIPQYLRFLQEWVEHFCKQRQEKVNAVITNCKSCKESGGTCNGECKTECEKKCKTKCKDECDAYKNFIENCKGGDGTAGSPWSKRWDQIYMRYSKYIEDAKRNRKAGTKNCGTSAAENKCVQSDIDSFFKHLIDIGLTTPSSYLSIVLDENICGDDNAPWTTYTTTEKCNKETDKSKSQQCNTAVVVNVPSPLGNTPHGYKYVCECRTPSNEETCDDRKEYMNQWISDTSKNPKGSGSGKDYYELCKYNGVKETKLPKKSSSTKLDENDVMFFNLFEQWNKEIQYQIEQYMTNTKISCNNEMKVLSRVSEESKNQNSSDNHDGGNNNTDQGTNCKEKCECYELWIEKIKKQWETQKKNYNNFETKQSNDARKSSQNKKEIVKLSHFLFFSCWEEYIQKYFNGDWSKIKNIGSDTFEFLIKKCGNNSGDGETIFSEKLNNAQQQCKEIQNTDTKINKSETSSVLNATNYIRGCQSKTYDGKIFPGKGGEKQWICKDTIIHGDTNGACIPPRTQNLCVGELWDKRYGGRSNIKNDTKESLKQKIKNAIQKETELLYEYHDKGTAIISRNPMKGKKANNNKNSNGLPKGFCHAVQRSFIDYKNMILGTSVNIYEYIGKLQEDIKKIIEQETTKQKDKIGGVGSSADKVNDWWKGIEGEMWGAVKSGIKTIKKQNNKCTYTGNECGVSPPTGNDEDQSVSWFKEWGEQFCIERLQYEQNIRDACTNNGKNGKKCINSKSGQEDKIQGDCKRKCEKYKKYISEKKKEWDKQKTKYENKYVGKSASDLLKENYPECISANFDFIFNDKADHKKYYPYGDYNSICSCEQVKYYKYNNAEKKNNKSLCHEKGNDRTWSKKYIKKLENGRTLEGVYVPPRRQQLCLYELFPIIIKKEKDMEKAKEELLETLQIVAEREAYYLWKQYNPTGKGIDDANKKACCAIRGSFYDLEDIIKGNDLVHDEYTKYIDSKLNKIFGSSNTNNIDTKRARTDWWENKTIDVPKIDVANGTDSKTIRQLVWDAMQSGVRYAVEKNEKKKQNENFPPCMRVQHIGIAKPQFIRWLEEWTNEFCEKYTKYFEDMKSNCDPPKGADDCGDNSNIECKKACANYTNWLNPKRIEWNGMSNYYNKIYRKSNKESEDGKDYSMIMEPTVIDYLNKRCHGEINGNYICCSCKNIGENSTSPAQKTKGSKKKGEQCEDNKGPLDLMNEVLNKMDEKYSAHKMKCTEVYLEHVEEQLKEIDNAIKDYQLYPLDRCFDDQTKMKVCDLIRDAIGCKDKTKLDELDEWNDVDMRDPYNKYKGVLIPPRRRQLCFSRIVRGPANLRNLNEFKEEILKGAQSEGKFLGNYYKEHKGNYYNEDKDKEKALEAMKNSFYDYEYIIKGSDMLTNIQFKDIKIKLDKLLTKETNNNIQNAEDWWKVNNKSIWNAMLCGYKKSGNKIIDPSWCTIPTTEKTPQFLRWIKEWGTNVCIEKEKYKQNVKLECSDVPNNNLGSQESESNNCTSEIRKYQEWSRNRSIQWEAISERYKKYKGMDILKDVKEPDANTYLKEHCSKCPCGFNDMQEIANDTENKQDIFKQIIEKVKIPAELEDVIYRLKHHEYNSNDYICNKYKNINVNMRHKNDDTWTDLLVKNSSDINKGVLIPPRRKNLFLNIDESDICKYKKNPKLFKDFIYSSAFTEVERLKIVYGEAKTKVAHAMKYSFADIGNIIKGDDMMENPTSKYMDKLFTSNKYSGINRETWWNENKYHVWESMLCGYQKGKNNTHSEKLDEAWCDLPMEGDIPQFLRWFQEWTETFCTRQKELKENVKKECNKVTCDKDTGKTDIKCTEACKNYSNFISIKQNEYESLKKQYNDNHKSTQADGKEAHLYFKEKCKDNKCNCLHEKFNSEDNWKKPYETLDDTELKNKCMCKPPPPASNNTSDILQKTIPFGIALALGSIAFLFMKKKPKTPVDLLRVLDIHKGDYGIPTLKSSNRYIPYVSDTYKGKTYIYMEGEETDDYSYIRDISSSDITSSSESEYEELDINDIYVPSLPKYKTLIEVVLEPSKRDTFNTSSGDTFTNKLTDDEWNQLKQDFIEQYLQNIQKDFILHDSMDEKPFITQIQDRFLDSSHEEVTYNIDWNVPENINRITNNMDDPKYSSNNLYTGTDLINDSLNGNQYIDIYDEMLKRKENELFGTYHTKYTTFNSVSKQTPSDPIINQLDLYHNWMDKHRDICEQCKTKKDMLYKLNEVWNMERKEYLLDIQPSTLDDIHKINDETYNIISTNNIYDHPSQETPLQLLASTNIIPSYITTEQNNGLRTNISMDTYIDETNNNNVVATSIIGDDQMENSYNC

SEQ ID NO: 66 - protein, 3096 aa, Plasmodium falciparum
MDSKTTIAEKIEAYLGAKSNDSKIDQSLKADPSEVQYYGSGGDGYYLKNNICKITVNHSDSGTNDPCDSIPPPYGDNDQWKCQQNSSDGSEKPENVFVPPRRQRMCIKNLENLNVDKIRDKHAFLADVLLTARNEGERIILYHPDTNSSNVCNALERSFADIADIIRGTDLWKGTNSNLEQNLRRMFAKIRENDKVLQDKYPKDQNYTKLREDWWNANRQKVWEVITCGARSNDLLIKRGWRTSGKSNGDNKLELCRKCGHYEEKVPTQLDYVPQFLRWLTEWIEDFYREKQNLIDDMERHREECTREYDKSKEGTSYCSTCKDKCKKYCECVKKWKSEWENQKNKYNDLYQQNKNKTSQKNTSRYDNYVKEFFKNFKGDNYKSLENYIKGDPYFAEYVTKLSFILNSSDANTSSEKIQKNNDEVCNCNESEIASVGQASISDPSSNKTCNTHSSIKANKKKVCKDVKLGVREKDKDLKICVIEDDSLRGVDNCCCQDLLGILQENCSDNKRGSSSNGSCNNKNQDECQKKLENVFASLTNGYKCDKCKSEQSKKNNNKWIWRKFPGKEGGLQKEYANTIGLPPRTQLLYLVCLHEKGKKTQELKNIRTNSELLKEWIIAAFHEGKNLKTTYPQKKNDDNGKKLCKDLKYSFADYGDLIKGTSIWDNDFTKDLELNLQQIFGKLFRKYIKKNNTAEQDTSYSSLDELRESWWNTNKKYIWTAMKHGAGMNSTMCNADGSVTGSSDSGSTTCSGDNGSISCDDIPTIDLIPQYLRFLQEWVEHFCEQRQAKVNAVITNCKSCKESGGTCNSDCKTECKNKCKVACDAYKTFIEDCKGGGTGTAGSSWVKRWYQIYMRYSKYIEDAKRNRKAGTKSCGTSSGANSGVTTAENKCVQSDIDSFFKHLIDIGLTTPSSYLSNVLDENNCGEDKAPWTTYTTYTTYTTYTTTKNCDKDKKKSKSQSCDTLVVVNVPSPLGNTPHGYKYACECKIPTTEETCDDRKEYMNQWIIDTSKKQKGSGSTNNDYELYTYNGVKETKPLGTLNSSKLDDKDVMFFNLFEQWNKEIQYQIEQYMTNTKISCNNEMKVLSSSSEESQNRNGSDHHDGRNNNINQGTNCKEKCKCYELWIKKIKEQWDKQKNNYNKFQRKQIYDANKGPQNKKVVSLSHFLFFSCWEEYIQKYFNGDWSKIKNIGSDTFEYLIKKCGNNSGDGETIFSEKLKNAEKKCKENKSTNNKMKSSGKSSDCSETNYIRGCQSKTYDGKIFPGKGGEKQWICKDTITHGDTNGACIPPRTQNLCVGELWYKSYGGRSNIKNDTKESLKNKLKNAIQKETELLYEYHDKGTAIISQNDKKEKANNNDSNGLPKGFCHAVQRSFIDYKNMILGTSVNIYEYIGKLQEDIKKIIEKGTTKQKDKIGGSGADKVNDWWKGIEGEMWDAVKCGITKINKKQKKNGTFNGDECGVSPPTGNDEDQFVSWFKEWGEQFCIERLRYEQNIREACTINGKNGKKCINSKSGQGDKVEGACKRKCEKYKKYISEKKQEWDKQKTKYENKYVGKSASDLLKENYPECISANFDFIFNDNIEYKTYYPYGDYSSICSCEQVKYYEYNNAEKKNNKSLCHEKGNDRTWSKKYIKKLENGRTLEGVYVPPRRQQLCLYELFPIIIKKEKDMEKAKKELLETLKIVAEREAYYLWKQYNPTGKGIDDANKKACCAIRGSFYDLEDIIKGNDLVHDEYTKYIDSKLNEIFGSSNKNDIDTKRARTDWWENETIDVPNITGANKSDSKTIRQLVWDAMQSGVRKAIYEEKEKKKQNENFPPCMRVEHIGIAKPQFIRWLEEWTNEFCEEYTKYFEDMKSKCDPPKRADDCGDNTNIECKKACANYTNWLNPKRIEWNGMSNYYNKIYRKSNKESEDGKDYSMIMEPTVIDYLNKRCHGEINGNYICCSCKNIGENYNPSPAQKTKGSKKKDEQCEDNKGPLDLMNEVLNKMDEKYSAHKMKCTEVYLEHVEEQLKEIDNAIKDYKLYPLDRCFDDQTKMKICDLIGDAIGCKDKTKLDELDEWNDMDLRDPYNKHKGVLIPPRRRQLCFSRIVRGPANLRNLNEFKEEILKGAQSEGKFLGNYYNEDKDKEKKEHKDKEKALEAMKNSFYDYEDIIKGSDMLANIQFKDIKRKLDKLLTKETNNNIQNAEDWWKVNNKSIWNAMLCGYKKSGNKIIDPSWCTIPTTEKTPQFLRWVKEWGTNVCIQKQEHKEYVKSKCSNVTNLGAQESESSNCISEIRKYQEWSRNRSIQWEAISEGYKKYKGMDILKDVKEPNANEYLKEYCSKCPCGFNDMEEITKYTNIGNEAFNTIIEKVKIPAELEDVIYRLKHHEYNSNDYICNKYKNINVNMRHKNDDTFVTDNSVKKSWEISNGVLIPPRRKNLFLKIDQSDICEYKKDPKLFKDFIYSSAFTEVERLKKVYGEARAKVVHAMKYSFADIGNIIKGDDMMENPTSKYIEQIFKGTEYSGIDRTKWWNKNKYHVWESMLCGYKEGGGDTKTNENCRFPDTDGVPQFLRWFQEWTETFCVTRQELYDEVRTKCAAAECDTTNGTIGNNCTIACQEYSNYILNKKDEYQSLKYQYDMNYKETKGKNKEAHEYIKNKCSNSKCQCLSKHTNNENNWKEPYETLDNMNLKAICDCPKPLPLFSDNTSDILQKTIPFGVALALGSIAFLFMKKKPKTPVDLLRVLDIHKGDYGIPTTKSSNRYIPYVSDTYKGKTYIYMEGEETDDYSYIRDISSSDITSSESEYEELDINDIYVPSLPKYKTLIEVVLEPSKRDTFNTSSGDTFTNKLTDDEWNQLKQDFIEQYLQNIQKDFILHDSVNEKPFITQIQDRFLDSSHEEVIYNIDWNVPENINRITNNMDDPKYSSNNLYTGTDLINDSLNGNQYIDIYDEMLKRKENELFGTYHTKYTTFNSVSKQTPSDPIINQLDLYHNWMDKHRDICEQWKTKEDMLYKLNEVWNMERKEYLLDIQPSTLDDIHKINDETYNIISTNNIYDHPSQETPLQLLGSTNIIPSYITTEQNNGLRTNISMDTYIDETNNNNVVATSIIGDDQMENSYNC

SEQ ID NO: 67 - protein, 292 aa, Artificial Sequence
  synthetic
DLNKINIKDKSPTTFDVDMIYLRRQYMKNELKSFVESTCLFKGMRNQEWTCQILKNLDVCKLNNFNKVIDIDKHITFKVLLERWLKDFLEGYKKSKRKINPCTKDKNSCIKLCINKCTCVEEWLNKKEKEWGQIKKHFNKQFHGEGYDIAFKVKSYFEDNEADVRKSIDNFHVLKNKEEYEICNVDDNCRSQNNKKKKDIVTILLKELKDKIVSCKNQHKATKGKECCDKLPKIADGDTSDDEEQEDEAPAPPKPKPPSTPNPCVRKDQSGTHIVSVEDVAEWMQGVTHDRV
